(19) United States
(12) Patent Application Publication
(10) Pub. No.: US 2013/0011875 A1
(43) Pub. Date: Jan. 10, 2013

(54) METHODS FOR THE PRODUCTION OF RECOMBINANT PROTEINS WITH IMPROVED SECRETION EFFICIENCIES

(75) Inventors: Michael Meehl, Lebanon, NH (US); Heping Lin, West Lebanon, NH (US); Byung-Kwon Choi, Norwich, VT (US)

(73) Assignee: Merck Sharpe & Dohme Corp, Rahway (NJ)

(21) Appl. No.: 13/503,707

(22) PCT Filed: Oct. 25, 2010
(86) PCT No.: PCT/US10/53903

§ 371 Date: Oct. 1, 2012

Related U.S. Application Data
(60) Provisional application No. 61/256,379, filed on Oct. 30, 2009.
(60) Provisional application No. 61/350,668, filed on Jun. 2, 2010.

(51) Int. Cl. C12N 1/19; C12P 21/00

(52) U.S. Cl. 435/69.1; 435/254.23

(57) ABSTRACT

The present invention is related to methods and for producing higher titers of recombinant protein in a modified yeast host cell, for example Pichia pastoris, wherein the modified yeast cell lacks vacuolar sorting activity or has decreased vacuolar sorting activity relative to an unmodified yeast host cell of the same species. In particular embodiments vacuolar sorting activity is reduced or eliminated by deletion or disruption of a gene encoding Vps10 or a Vps10 homolog. The invention is also related to the modified yeast cells which are modified in accordance with the methods disclosed herein.

### CROSS REFERENCE TO RELATED APPLICATIONS

[0001] This application claims the benefit of U.S. Provisional Application No. 61/256,379, filed Oct. 30, 2009, and U.S. Provisional Application No. 61/350,668, filed Jun. 2, 2010, the disclosures of which are herein incorporated by reference in their entirety.

### FIELD OF THE INVENTION

[0002] The invention relates to methods and compositions for producing recombinant proteins in fungal cells, including yeast cells, with increased secretion efficiencies.

### REFERENCE TO SEQUENCE LISTING SUBMITTED ELECTRONICALLY

[0003] The sequence listing of the present application is submitted electronically via EFS-Web as an ASCII formatted sequence listing with a file name “GFIMIS00004_SEQTXT_{—}18OCT2010.TXT”, creation date of Oct. 18, 2010, and a size of 861 KB. This sequence listing submitted via EFS-Web is part of the specification and is herein incorporated by reference in its entirety.

### BACKGROUND OF THE INVENTION

[0004] Expression of recombinant proteins in eukaryotic cells has become increasingly important due to the current focus on biologic therapeutics, which represents the largest growth segment of FDA-regulated drugs. Whether the production cell is a CHO-based mammalian cell line or glycoengineered Pichia pastoris (Sethuraman and Stadheim, Curr. Opin. Biotechnol. 17: 341-346 (2006)), maximal secretion titers are critical. While many efforts to increase protein production focus on promoter and copy number of the recombinant gene (Daly and Hearn, J. Mol. Recognit. 18: 1999-38 (2005)), efficient secretion is only achieved if the recombinant protein transits a specific path from the endoplasmic reticulum (ER) to the Golgi apparatus, followed by the trans-Golgi network and finally, to the exocytic vesicles for delivery through the plasma membrane. If the recombinant protein deviates from this desired secretory route, the yield will decline.

[0005] Glycoengineered yeast offer distinct advantages for therapeutics development compared to mammalian cells. For example, the glycosylation profiles of mammalian cell-based systems are heterogeneous (Li et al., Nat. Biotechnol. 24: 210-15 (2006)) while glycoengineered Pichia pastoris has proven to provide uniform glycosylation (Hamilton et al., Science 313:1441-43 (2006)). Although genetic modifications of mammalian glycosylation are possible, such as eliminating fucose (Shinkawa et al., J. Biol. Chem. 278: 3466-73 (2003)), most glycoform selection must occur at the fermentation and/or purification steps, often limiting yield. The ease of genetic manipulations in yeast affords opportunities to improve protein yield independent of fermentation and purification compared to mammalian host cells.

[0006] In yeast, endogenous proteins that are delivered to the vacuole are degraded by proteinases. The yeast vacuole is an organelle analogous to the mammalian lysosome that is critically important for endocytosis, protein turnover, and nutrient acquisition to maintain cellular homeostasis. One mechanism of vacuolar protein trafficking is the carboxypeptidase Y pathway, which delivers proteins from the trans Golgi network (TGN). In Saccharomyces cerevisiae, the protein receptors responsible for initial interactions of carboxypeptidase Y in the TGN are named Vps10 (also known as Pep1 or Vpt1), Vth1, and Vth2. In S. cerevisiae, Vps10 functions to deliver vacuolar-residing proteinases to the prevacuolar compartment, leading to eventual proteolysis in the vacuole (for reviews, see Bowers and Stevens, Biochim. Biophys. Acta 1744:438-54 (2005); Li and Kane, Biochim. Biophys. Acta. 1983: 650-663 (2009), epub August 2008).

[0007] Marcusson et al. (Cell 77: 579-586 (1994)) showed that in Saccharomyces cerevisiae, Vps10 is required for the sorting of Cpy to the yeast vacuole. Marcusson et al. further showed that mutation of the VPS10 gene leads to defective vacuolar protein sorting of endogenous Cpy, leading to its secretion. However, it was also shown that disruption of VPS10 and loss of Vps 10 activity did not have any affect on the sorting of the vacuolar enzymes PrA and PrB, which properly transited the path to the vacuole in a S. cerevisiae strain in which the VPS10 gene was knocked-out. Iwaki et al. (Microbiology 152: 1523-32 (2006)) also showed that deletion of VPS10 in Schizosaccharomyces pombe resulted in missorting and secretion of Cpy, suggesting that Vps10 is required for sorting Cpy to the vacuole. The Vps10 sorting receptor was also shown to function in Cpy sorting in a similar fashion for Saccharomyces pombe (Takegawa et al., Curr Genet. 42(5):252-9 (2003); Iwaki et al., Microbiology 152(5):1523-32 (2006)).

[0008] J. Denecke (U.S. Patent Application No. 2005/0019855) discloses a method of limiting proteolysis by preventing export of proteins out of the ER and/or redirecting proteins from the vacuolar sorting pathway back to the ER or the cell surface. It is further suggested that the vacuolar sorting receptor Vps10 can be modified in such a way to re-direct proteins back to the ER, thereby increasing heterologous protein expression.

[0009] Idiris et al. (Appl Microbial. Biotechnol. 85(3):667-77 (2010), Epub 2009 Aug. 11) describe a 2-fold increased secretion of human growth hormone (hGH) in the strain A8-vps10Δ, which is a Schizosaccharomyces pombe strain that comprises a VPS10 deletion as well as eight protease gene deletions, when compared to the A8 strain that had only the eight protease deletions. However, a low level of r-hGH secretion was retained intracellularly, which suggested that several VPS genes, which are related to intracellular protein retention, must be deleted in order to completely block the vacuolar accumulation pathway.

[0010] Takegawa et al. (supra) also describe a vps10 deficient strain of Schizosacharomyces pombe and show that Cpy is not processed to its mature form in this mutant. However, this study does not describe the expression of heterologous therapeutic protein in the vps10Δ strain.

[0011] Agaphonov et al. (FEMS Yeast Research 5: 1029-1035 (2005)) inactivated the VPS10 gene in Hansenula polymorpha and did not observe an increase in secretion of human urokinase-type plasminogen activator (uPA). In this study, an increase in proteolytic processing of uPA was observed in the VPS10 deficient strain.

[0012] It would be highly desirable to develop methods of increasing the yield of heterologous proteins produced in fungal or yeast cells by eliminating or reducing vacuolar sorting activity.

### SUMMARY OF THE INVENTION

[0013] The present invention is related to, inter alia, methods for producing a recombinant protein in a yeast or fungal host cell comprising: (a) transforming a genetically modified yeast or fungal host cell with an expression vector encoding the protein to produce a host cell, wherein the genetically modified yeast or fungal cell lacks vacuolar sorting activity or has decreased vacuolar sorting activity relative to an unmodified yeast or fungal host cell of the same species; (b) culturing the transformed yeast or fungal host cell in a medium under conditions which induce expression of the protein in fermentation conditions; and (c) isolating the protein from the transformed yeast or fungal host cell or culture medium. In some embodiments of this aspect of the invention, the yeast or fungal host cell is selected from the group consisting of: Pichia pastoris, Saccharomyces cerevisiae, Aspergillus niger, Saccharomyces pombe, Candida albicans, Candida glabrata, Pichia stipitis, Debaryomyces hansenii, Kluyveromyces lactic, and Hansenula polymorpha (also known as Pichia angusta). In one preferred embodiment, the host cell is a Pichia cell, in specific embodiments the host cell is Pichia pastoris.

[0014] In other embodiments, the invention relates to a method for producing a recombinant protein in a yeast or fungal host cell comprising: (a) expressing the recombinant protein in a genetically modified yeast or fungal host cell, wherein the genetically modified yeast or fungal host cell lacks vacuolar sorting activity or has decreased vacuolar sorting activity relative to an unmodified yeast or fungal host cell of the same species; (b) culturing the genetically modified yeast or fungal host cell in a medium under conditions which induce expression of the protein in fermentation conditions; and (c) isolating the protein from the yeast or fungal host cell or culture medium.

[0015] In particular embodiments of the methods of the invention, vacuolar sorting activity is eliminated or reduced by deletion or disruption of a gene encoding Vps10 or a Vps10 homolog such as Vps10-1 from the fungal or yeast cell genome.

[0016] The invention also relates to a method for producing a recombinant protein in a Pichia host cell comprising: (a) transforming a genetically modified Pichia cell with an expression vector encoding the protein to produce a host cell, wherein the genetically modified Pichia cell lacks vacuolar sorting activity relative to an unmodified Pichia cell of the same species; (b) culturing the transformed Pichia host cell in a medium under conditions that induce expression of the protein; and (c) isolating the protein from the transformed cell or culture medium. In some embodiments of this aspect of the invention, the host cell is a Pichia pastoris cell.

[0017] The invention further provides a Pichia pastoris cell lacking vacuolar sorting activity or having reduced vacuolar sorting activity relative to a wild-type Pichia pastoris cell, wherein the host cell comprises a functional deletion of a vacuolar protein sorting receptor 10-1 (Vps10-1), for example the Vps10-1 protein set forth in SEQ ID NO:20. In some embodiments, the P. pastoris cell is further modified to express glycoproteins in which the glycosylation pattern is human-like. In still further embodiments, a gene encoding Vps10-1 is deleted and a gene encoding Vps10-2 is intact (i.e., not deleted).

[0018] As used throughout the specification and in the appended claims, the singular forms “a,” “an,” and “the” include the plural reference unless the context clearly dictates otherwise.

[0019] As used throughout the specification and appended claims, the following definitions and abbreviations apply:

### DEFINITIONS

[0020] “QRPL-like’ sorting signal” refers to a vacuolar sorting signal that allows a recombinant protein to bind to Vps10. In carboxypeptidase Y (Cpy), the sequence QRPL (SEQ ID NO:176) binds to Vps10, leading to Cpy being directed to the vacuole. “QRPL-like” sorting signals have homology to the QRPL sequence and allow binding of the recombinant protein to Vps10 or a Vps10 homolog. Examples of “QRPL-like” sorting signals include, but are not limited to, “QSFL” (SEQ ID NO:179) and “QVAF” (SEQ ID NO:180).

[0021] “Vps10-1” refers to a vacuolar sorting receptor 10-1 in a Pichia pastoris cell, such as the Vps10-1 protein as defined by the amino acid sequence set forth in SEQ ID NO:20. One skilled in the art will realize that minor variations in Vps10-1 sequence can occur in different Pichia pastoris cell lines that will not alter the function of the protein. Thus, a reference to Vps10-1 includes the protein sequence set forth in SEQ ID NO:2 and protein sequences that are structurally and functionally similar, i.e. function in an equivalent manner (e.g. participate in vacuolar sorting) and have an amino acid sequence with at least 90% sequence identity to SEQ ID NO:20, more preferably at least 92% identity, at least 94% identity, even more preferably at least 96% identity, at least 98% identity or at least 99% identity.

[0022] “Vps10-2” refers to a vacuolar sorting receptor 10-2 in a Pichia pastoris cell, such as the Vps10-2 protein as defined by the amino acid sequence set forth in SEQ ID NO:21 One skilled in the art will realize that minor variations in Vps 10-2 sequence can occur in different Pichia pastoris cell lines that will not alter the function of the protein. Thus, a reference to Vps10-2 includes the protein sequence set forth in SEQ ID NO:21 and protein sequences that are structurally and functionally similar, i.e. function in an equivalent manner and have an amino acid sequence with at least 90% identity to SEQ ID NO:21, more preferably at least 92% identity, at least 94% identity, even more preferably at least 96% identity or at least 98% identity.

[0023] “Homolog,” as used herein, refers to a gene or protein sequence that shares structural and functional similarity to a reference sequence. The term “homolog” includes both orthologs, which are sequences in different species that are structurally similar due to evolution from a common ancestor, and paralogs, which are similar sequences within the same genome.

[0024] “Reduction of protein function” including “reduced vacuolar sorting activity” refers to the reduction of protein function in a “modified” host cell relative to a host cell of the same species that does not comprise the modification at issue. The function of a particular protein is said to be “reduced” when the modified protein has at least 20% to 50% lower activity, in particular aspects, at least 40% lower activity or at least 50% lower activity, when measured in a standard assay, relative to an unmodified protein. One skilled in the art understands that both the “modified host cell” and the “unmodified host cell” may comprise additional mutations that are not related to the protein which is being functionally assessed. For example, when assessing reduction of Vps 10 protein function, a “modified” Pichia pastoris host cell which comprises a deletion of Vps10 and further comprises a deletion of BMT1 so as to eliminate glycoproteins having α-mannosidase-resistant N-glycans is compared to an “unmodified” host cell which does not comprise a Vps 10 deletion, but does comprise a BMT1 deletion.

[0025] “Elimination of protein function” refers to the elimination of protein function or activity in a “modified” host cell relative to a host cell of the same species which does not comprise the modification to the particular protein being assessed. In particular embodiments, a modified protein is said to have “eliminated function” when it has at least 90% to 99% lower activity relative to a protein without said modification. In particular aspects, the modified protein has at least 95% lower activity or at least 99% lower activity, when measured in a standard assay. In some aspects the modified protein has completely ablated protein activity or function.

[0026] The term “deleted or disrupted” and “deletion or disruption” or “functional deletion” as used herein refers to any disruption or inhibition of the activity or function of a particular protein, such as the Pichia pastoris Vps10-1 and Vps10-2 proteins, Vps10 homologs in other species such as Saccharomyces cerevisiae, or other proteins which participate in vacuolar sorting, said protein produced from a yeast cell genome, in which the inhibition of the protein activity renders the protein incapable of performing its intended function or only capable of performing its intended function to a lesser degree relative to an unmodified yeast cell of the same species not comprising the deletion or disruption. Examples of which are yeast host cells in which vacuolar sorting activity can be abrogated or disrupted including, but not limited to, 1) deletion or disruption of the upstream or downstream regulatory sequences controlling expression of a gene which participates in vacuolar sorting; 2) mutation of the gene encoding the protein activity to render the gene non-functional, where “mutation” includes deletion, substitution, insertion, or addition into the gene to render the encoded protein incapable of vacuolar sorting activity; 3) abrogation or disruption of the vacuolar sorting activity by means of a chemical, peptide, or protein inhibitor; 4) abrogation or disruption of the vacuolar sorting activity by means of nucleic acid-based expression inhibitors, such as antisense RNA, RNA interference, and siRNA; 5) abrogation or disruption of the vacuolar sorting activity by means of transcription inhibitors or inhibitors of the expression or activity of regulatory factors that control or regulate expression of the gene encoding the enzyme activity; 6) co-expression of a peptide or protein that is known to bind to Vps 10, such as Cpy, to saturate the vacuolar receptor and reduce sorting of secreted recombinant protein; 7) co-expression of a mutated Vps10 protein that is not membrane associated or a dominant-negative Vps 10 protein that acts to prevent normal vacuolar sorting patterns; 8) alteration of the amino acid sequence of the recombinant protein of interest to eliminate a Vps10-binding domain and prevent vacuolar sorting; and 9) by any means in which the protein product obtained, even if expressed, is not identical to the protein obtained from an unmodified yeast cell and the function is attenuated.

### ABBREVIATIONS

[0027] VPS10-1 vacuolar protein sorting receptor 1
[0028] VPS10-2 vacuolar protein sorting receptor 2
[0029] ScSUC2 S. cerevisiae invertase
[0030] OCH1 alpha-1,6-mannosyltransferase
[0031] KlMNN2-2: K. lactis UDP-GlcNAc transporter
[0032] BMT1: beta-mannose-transfer 1 (beta-mannose elimination)
[0033] BMT2: beta-mannose-transfer 2 (beta-mannose elimination)
[0034] BMT3: beta-mannose-transfer 3 (beta-mannose elimination)
[0035] BMT4: beta-mannose-transfer 4 (beta-mannose elimination)
[0036] MNN4L1: MNN4-like 1 (charge elimination)
[0037] MmSLC35A3 mouse homologue of UDP-GlcNAc transporter
[0038] PNO1: phosphomannosylation of N-linked oligosaccharides (charge elimination)
[0039] MNN4: mannosyltransferase (charge elimination)
[0040] FB53: MmMNS1A fused to ScMNN2 leader
[0041] TrMDS1: secreted T. reseei MNS1
[0042] Sh ble: zeocin resistance marker
[0043] HSAss: human serum albumin signal sequence
[0044] DAP2: dipeptidyl aminopeptidase
[0045] STE13: dipeptidyl aminopeptidase
[0046] CLP1: P. pastoris cellulase-like protein 1
[0047] 5-FOA 5-fluoroorotic acid
[0048] TNFRII-Fc tumor necrosis factor receptor 2 ectodomain fused to Fc region of IgG1
[0049] ER endoplasmic reticulum
[0050] GCSF granulocyte colony-stimulating factor
[0051] rhGCSF recombinant human granulocyte colony-stimulating factor

### BRIEF DESCRIPTION OF THE DRAWINGS

[0052] FIG. 1 shows the construction of pGLY5192 (vps10-1 knock-out plasmid) and pGLY5194 (vps10-2 knock-out plasmid). Plasmid maps of constructs that were used to generate pGLY5192 and pGLY5194, including restriction enzyme sites and insert DNA, are shown.

[0053] FIGS. 2A-2B show the construction of plasmid vector pGLY5178 (rhGCSF expression plasmid) encoding rHuMetGCSF and targeting the Pichia pastoris AOX1 locus. Plasmid maps of constructs that were used to generate pGLY5178, including restriction enzyme sites and insert DNA, are shown.

[0054] FIG. 3 shows the construction of pGLY3465 (TNFRII-Fc expression plasmid). Plasmid maps, restriction enzymes, and insert DNA that were used to generate pGLY3465 are described.

[0055] FIGS. 4A-4E depict the generation of yGLY8538, a glycoengineered Pichia pastoris strain expressing rhGCSF. Strain construction involved the use of a parental strain and genetic alteration (via plasmid or media selection) to generate a resulting strain with the correct genotype, as listed. The annotation of genes listed in the genotype is described in the summary of the invention. The final strain, yGLY8538, is a recombinant human granulocyte colony-stimulating factor (rhGCSF) expression strain that was used to make subsequent mutant strains.

[0056] FIGS. 5A-5D depict the generation of yGLY9993. Strain construction involved the use of a parental strain and genetic alteration (via plasmid or media selection) to generate a resulting strain with the correct genotype, as listed. The annotation of genes listed in the genotype is described in the summary of the invention. The final strains, yGLY9992 and yGLY9993, are isogenic vps10-1 mutants of yGLY8292. These strains are zeocin sensitive and therefore do not contain rhGCSF or TNFRII-Fc.

[0057] FIG. 6 depicts the generation of yGLY8538 mutant strains. The rhGCSF expression strain yGLY8538 was mutated in genes vps10-1 (yGLY9933), vps10-2 (yGLY10566), or both (yGLY10557). Strain construction involved the use of a parental plasmid and genetic alteration (via plasmid or media selection) to generate a resulting strain with the correct genotype, as listed in relation to yGLY8538.

[0058] FIG. 7 shows the effect of Vps 10 activity on rhGCSF titer (Panel A) and cell lysis (Panel B). See Example 14. Data listed were generated from Sixfors (0.5L) fermentation experiments. Panel A: The listed strains were fermented under identical conditions and cell-free supernatant fluids were analyzed by ELISA to quantitate levels of rhGCSF. The ELISA values for each were divided by the parental control yGLY8538 ELISA value to obtain the relative titer. Panel B: The listed strains were fermented under identical conditions and cell-free supernatant fluids were analyzed by PicoGreen® assay to quantitate levels of double-stranded DNA. The PicoGreen® dsDNA values for each were divided by the parental control yGLY8538 PicoGreen® dsDNA value to obtain a relative cell lysis value.

[0059] FIG. 8 shows the effect of Vps 10 activity on TNFRII-Fc titer (see EXAMPLE 15). Data listed was generated from a 96 well deep well induction plate experiment. The listed strains were transformed with pGLY3465 and data represents relative titers from at least eleven independent colonies. Cell-free supernatant fluids were analyzed by ELISA to quantitate levels of TNFRII-Fc. The ELISA values for each parental strain were averaged then divided by the average ELISA value of parental control yGLY8292 to obtain the relative titer. Both yGLY9992 and yGLY9993 strains are independent mutants of vps10-1.

[0060] FIGS. 9A-B show a model of Vps10-activity in Pichia pastoris. Schematic diagrams of Vps 10 receptor functions in both wild-type (panel A) and vps10-1Δ mutant (panel B) strains. After mRNA transcription in the nucleus, the protein polypeptide is translated and translocated to the lumen of the endoplasmic reticulum. After transiting to the late Golgi, GCSF interacts with Vps10-1 in wild-type cells (A). Vps10-1, via a cytoplasmic tail, circulated from the Golgi to the prevacuolar compartment (PVC), where GCSF dissociates from the receptor. Whereas Vps10-1 circulates back to the Golgi, GCSF in the PVC migrates to the vacuole and is proteolytically degraded. In the mutant cell (B), Vps 10-1 protein is absent and therefore more GCSF is secreted to the culture supernatant fraction.

[0061] FIG. 10 lists the primer sequences used to generate plasmids described in the Examples (SEQ ID NOs: 1-13).

[0062] FIG. 11 lists the plasmids (panel A) and the strains (panel B) used in the Examples.

[0063] FIG. 12 provides a comparison of the length, percent similarity and percent identity between fungal Vps10 homologs, when compared to S. cerevisiae Vps10.

[0064] FIGS. 13A-13E show the nucleotide sequence of the Pichia pastoris VPS10-1 region (SEQ ID NO:14) including upstream homologous fragment, promoter, open reading frame (nucleotides 1610-6238), and downstream homologous fragment.

[0065] FIGS. 14A-14D show the nucleotide sequence of the Pichia pastoris VPS10-2 region (SEQ ID NO:15) including upstream homologous fragment, promoter, open reading frame (nucleotides 830-4509), and downstream homologous fragment.

[0066] FIG. 15 shows the amino acid sequence of P. pastoris Vps10-1 (SEQ ID NO:20).

[0067] FIG. 16 shows the amino acid sequence of P. pastoris Vps 10-2 (SEQ ID NO:21).

[0068] FIG. 17 shows the amino acid sequence of S. cerevisiae Vps 10 (also known as Pep1 or Vpt1, SEQ ID NO:22).

[0069] FIG. 18 shows the amino acid sequence of Aspergillus niger Vps10 (SEQ ID NO:26).

[0070] FIG. 19 shows the amino acid sequence of Saccharomyces pombe Vps10 (SEQ ID NO:27).

[0071] FIG. 20 shows the amino acid sequence of Candida albicans Vps10 (SEQ ID NO:28).

[0072] FIG. 21 shows the amino acid sequence of Candida glabrata Vps 10 (SEQ ID NO:29).

[0073] FIG. 22 shows the amino acid sequence of Pichia stipitis Vps 10 (SEQ ID NO:30).

[0074] FIG. 23 shows the amino acid sequence of Debaryomyces hansenii Vps10 (SEQ ID NO:181).

[0075] FIG. 24 shows the amino acid sequence of Kluyveromyces lactis Vps10 (SEQ ID NO:182).

[0076] FIG. 25 provides the SEQ ID NOs of the amino acid sequences of proteins associated with the CPY vacuolar sorting pathway.

[0077] FIG. 26 provides the SEQ ID NOs of the amino acid sequences of proteins associated with the recycling of Vps10 to the late Golgi from the PVC.

[0078] FIG. 27 provides the SEQ ID NOs of the amino acid sequences of proteins associated with proper MVB function and/or fusion to the vacuole.

[0079] FIG. 28 provides the SEQ ID NOs of the amino acid sequences of proteins that are associated with proper Cpy vacuolar targeting through unknown mechanisms.

### DETAILED DESCRIPTION OF THE INVENTION

[0080] The present invention provides, inter alfa, methods for producing recombinant proteins in a genetically modified yeast or fungal host cell lacking vacuolar sorting activity or having decreased vacuolar sorting activity relative to an unmodified yeast or fungal host cell of the same species, wherein the yeast or fungal cell is modified so as to eliminate the function of Saccharomyces cerevisiae Vps10, or a Vps10 homolog, including, but not limited to, Pichia pastoris Vps10-1. In some embodiments of the invention, the yeast or fungal cell is modified so that the gene encoding Vps10 or Vps10 homolog is deleted or disrupted, as described infra.

[0081] Efficient, high-yield expression of recombinant proteins in eukaryotic cells is essential to the development of many biologic therapeutic products. In order to achieve the high yield of proteins that is required for the commercial development of a therapeutic protein, it is important that maximal secretion titers of the protein are obtained. The secretory path of S. cerevisiae is well characterized with a large number of gene functions elucidated. After mRNA molecules are translated and proteins enter the ER lumen, numerous processes may occur to the protein including additions of asparagine-linked glycans (N-linked), serine/threonine-linked mannose (O-linked), folding assisted by ER-resident chaperones, disulfide bond formation, retro-translocation out of the ER, binding to cargo receptors, trafficking to the Golgi via COPII vesicles, and others.

[0082] It is a goal of the present invention to increase the titer of heterologously expressed therapeutic proteins in yeast cell culture, including yeast cell culture in fermentation conditions. The secretion of heterologously expressed proteins via exocytosis is negatively impacted by alternative trafficking to the vacuole. Vacuolar sorting of recombinant proteins could decrease the secretory yield in the supernatant fraction. In order to develop methods for increasing the secretion of recombinant proteins expressed in yeast or fungal cells, we initially considered modification of three potential alternative trafficking pathways, which may direct recombinant proteins to the vacuole: (1) cytoplasm-to-vacuole targeting (CVT), (2) the alkaline phosphatase pathway (ALP) (Piper et al. J Cell Biol 138: 531-45 (1997)), and (3) the carboxypeptidase Y (CPY) pathway (Marcusson et al., supra, and Cooper & Stevens, J Cell Biol 133: 529-41 (1996)). CVT is a specific type of autophagy whereby the normal cellular function is to direct vacuolar-resident proteins from the cytoplasm, after protein synthesis, to the vacuole. However, this pathway does not typically interact with recombinant proteins destined for the secretory pathway; therefore, it did not represent an opportunity to increase protein yield. The ALP pathway delivers membrane-bound proteins, such as alkaline phosphatase, in the Golgi to the vacuole via specific signaling interactions in the carboxy-terminal cytoplasmic domain of the membrane-bound ALP substrate. Since this pathway only sorts transmembrane proteins to the vacuole, which are typically not recombinant therapeutic proteins, it also did not represent a mechanism to increase secretory yield for therapeutic protein production.

[0083] The third alternative sorting mechanism in Saccharomyces cerevisiae, the CPY pathway, is a process by which pro-carboxypeptidase y (pro-Cpy, also known as Prc1) interacts with the vacuolar protein sorting receptor, Vps10 (also known as Pep1 or Vpt1), in the late Golgi. By way of vesicle trafficking mediated by numerous proteins with the carboxy-terminal cytoplasmic domain of Vps 10, pro-Cpy is targeted to an intermediate compartment named the prevacuolar complex (PVC) (also known as multivesicular body (MVB)). After dissociation of pro-Cpy from Vps 10 in the PVC, Vps 10 is recycled back to the late Golgi by a specific group of proteins. PVC vesicles containing pro-Cpy then are trafficked to the vacuole and a fusion event occurs with additional protein components. Pro-Cpy then matures to active Cpy in the vacuole and the sorting is completed. Of the three pathways initially considered, the CPY pathway is the most relevant to soluble, secreted recombinant proteins. Since recombinant proteins in the secretory pathway transit the late Golgi prior to exocytosis, they have the potential to interact with Vps10. Should a recombinant protein contain a sequence that binds to Vps10, the recombinant protein would be sorted to the vacuole or lysosome via the CPY pathway and likely degraded by proteases, thus reducing the secretion rate and limiting titer. We hypothesized that by eliminating vacuolar sorting through this pathway, more recombinant protein could be secreted via exocytosis, thereby increasing cell productivity.

[0084] Although much was known about the secretory pathway in S. cerevisiae for endogenous proteins, it was not known prior to the present invention whether the titer of a heterologously-expressed recombinant therapeutic protein could be improved by expressing a gene encoding the heterologous protein in a vps10 yeast mutant in fermentation conditions. It was also not known if a functional deletion of a vps10 homolog in a Pichia cell could increase the secretion of a recombinant protein encoded by a gene contained within an expression vector in the cell.

[0085] To this end, embodiments of the present invention are related to the identification of a major bottleneck of recombinant protein expression in yeast. As described above, in Saccharomyces cerevisiae, Vps10 is responsible for binding pro-Cpy and localizing the protein to the vacuole. Two homologs of the VPS10 gene were identified in Pichia pastoris, named VPS10-1 and VPS10-2. Vectors to create null mutations in the two loci, vps10-1 and vps10-2, were constructed. Plasmids were transformed in P. pastoris to create null mutants of these genes. The vps10-1 genetic mutants displayed increased secretion of rh-GCSF and TNFRII-Fc, The vps10-2 knock-out strain did not lead to increased secretion of rhGCSF and, for this reason, TNFRII-Fc secretion was not tested in this strain. Our data indicates both rhGCSF and TNFRII-Fc are targeted to the vacuole for degradation via Vps10-1 binding in the trans-Golgi network (TGN) of Pichia pastoris. Thus, it is demonstrated herein that in a Pichia host cell, a portion of a recombinantly-expressed protein is re-routed from the correct secretory pathway to an alternate pathway that leads to the yeast vacuole, via Vps10 interactions (Marcusson et al., Cell 77: 579-86 (1994)). Once proteins are sorted to the vacuole or lysosome, they are removed from the secretory pathway and are degraded by proteases, thus reducing the secretion rate of recombinant proteins. It is shown herein that by eliminating vacuolar sorting through the CPY pathway, more recombinant protein is secreted via exocytosis, thereby increasing cell productivity. In accordance with embodiments of the invention, it has been shown that genetic inactivation of a Pichia pastoris VPS10 homolog, VPS10-1, dramatically increased secretion of recombinant hGCSF and TNFRII-Fc into the culture medium. From the known amino acid sequences of GCSF and TNFRII-Fc, sequences were identified near the amino termini of these proteins with high homology to the “QRPL” consensus Vps10 binding sequence (see EXAMPLE 13, van Voorst et al., J. Biol. Chem. 271: 841-6 (1996)). Further, the reported crystal structure of these proteins (Hill et al., Proc. Natl. Acad. Sci. USA 90: 5167-71 (1993), Tamada et al. Proc. Acad. Sci. USA 103: 3135-40 (2006)) indicated that they contain surface-exposed peptides. These observations led to the development of methods described herein, in which secretory rates of recombinant proteins comprising “QRPL”-like sequences,” which bind to the vacuolar protein sorting receptor Vps10, can be improved via genetic alterations of VPS10 or a VPS10 homolog in the host cell of choice.

[0086] Thus, embodiments of the present invention provide methods for producing a recombinant protein in a yeast host cell comprising: (a) transforming a genetically modified fungal or yeast host cell with an expression vector encoding the protein to produce a host cell, wherein the genetically modified fungal or yeast cell lacks vacuolar sorting activity or has decreased vacuolar sorting activity relative to an unmodified fungal or yeast host cell of the same species; (b) culturing the transformed host cell in a medium under conditions which induce expression of the protein in fermentation conditions; and (c) isolating the protein from the transformed host cell or culture medium.

[0087] The invention also provides a method for producing a recombinant protein in a yeast or fungal host cell, the method comprising: (a) expressing the recombinant protein in a genetically modified yeast or fungal host cell, wherein the genetically modified yeast or fungal host cell lacks vacuolar sorting activity or has decreased vacuolar sorting activity relative to an unmodified yeast or fungal host cell of the same species; (b) culturing the genetically modified yeast or fungal host cell in a medium under conditions which induce expression of the protein in fermentation conditions; and (c) isolating the protein from the yeast or fungal host cell or culture medium.

[0088] In embodiments of the methods of the invention described above, the host cell is a yeast cell. In specific embodiments, the host cell is a Pichia cell, such as Pichia pastoris.

[0089] The invention further provides methods for producing a recombinant protein in a Pichia host cell comprising: (a) transforming a genetically modified Pichia cell with an expression vector encoding the protein to produce a host cell, wherein the genetically modified Pichia cell lacks vacuolar sorting activity or has decreased vacuolar sorting activity relative to an unmodified Pichia cell of the same species; (b) culturing the transformed Pichia host cell in a medium under conditions that induce expression of the protein; and (c) isolating the protein from the transformed host cell or culture medium.

[0090] In particular embodiments of this aspect of the invention, the host cell is a Pichia pastoris cell.

[0091] In accordance with the methods of the invention described above, vacuolar sorting activity can be eliminated or reduced from the host cell of choice by genetic deletion or disruption of a gene encoding Vps10 or a Vps10 protein homolog. In this embodiment of the invention, a Vps 10 protein homolog is identified in the desired host cell by, for example, using a known Vps10 or a known Vps10 protein homolog sequence to search the appropriate yeast or fungal genome using a computational search program such as TBLASTN, which searches for similar proteins in a translated nucleotide database (see Example 3). One skilled in the art may also identify VPS10 gene homologs in the desired host cell by designing PCR primers or DNA probes based on the known sequence of S. cerevisiae VPS10 and screening a DNA library comprising DNA of the desired host. The S. cerevisiae Vps10 amino acid sequence is shown in FIG. 17 (SEQ ID NO:22). Once a Vps10 protein homolog is identified in the desired host cell, vacuolar sorting activity can be functionally deleted from that host cell through deletion or disruption of the VPS10 gene homolog, as described herein.

[0092] A number of previously known sequences that are Vps 10 homologs are provided herein and are shown in FIGS. 15 and 16 for P. Pastoris ((Vps10-1 and Vps10-2, SEQ ID NOs: 20 and 21, respectively), FIG. 18 for Aspergillus niger (SEQ ID NO:26), FIG. 19 for Saccharomyces pombe (SEQ ID NO:27), FIG. 20 for Candida albicans (SEQ ID NO:28), FIG. 21 for Candida glabrata (SEQ ID NO:29), FIG. 22 for Pichia stipitis (SEQ ID NO:30), FIG. 23 for Debaryomyces hansenii (SEQ ID NO:181), and FIG. 24 for Kluyveromyces lactis (SEQ ID NO:182). Thus, any of these sequences can be targeted for deletion or disruption in the appropriate host cell in order to develop a host cell that lacks vacuolar sorting activity. Use of said host cell in the methods of the present invention, is expected to result in higher levels of recombinant protein production.

[0093] Additionally, other genes in S. cerevisiae with homology to Vps10 may perform similar functions and therefore, may be deleted or disrupted in accordance with the invention in order to decrease vacuolar sorting activity and increase heterologous protein yield. For example, S. cerevisiae Vth1p (SEQ ID NO:23), S. cerevisiae Vth2p (SEQ ID NO:24), and S. cerevisiae YNR065c (SEQ ID NO:25)) share homology with Vps10 and are thought to function in a similar manner to Vps10.

[0094] Genetic inactivation of VPS10 or a VPS10 gene homolog in the desired host cell can be accomplished by deletion of the Vps 10 open reading frame (ORF) through the use of homologous recombination. Alternatively, the VPS10 gene or a VPS10 gene homolog can also comprise a functional deletion, wherein the complete ORF has not been deleted, but alternate mutations are present that abrogate or disrupt the function of Vps 10, such as partial deletions of the VPS10 gene or homolog, including single codon deletions, point mutations, and substitutions. Other methods that can be used to abrogate the function of Vps10 include, but are not limited to: deletion or disruption of the upstream or downstream regulatory sequences controlling expression of a gene which participates in vacuolar sorting; 2) abrogation or disruption of the vacuolar sorting activity by means of a chemical, peptide, or protein inhibitor; 3) abrogation or disruption of the vacuolar sorting activity by means of nucleic acid-based expression inhibitors, such as antisense RNA, RNA interference, or siRNA; and 4) abrogation or disruption of the vacuolar sorting activity by means of transcription inhibitors or inhibitors of the expression or activity of regulatory factors that control or regulate expression of the gene encoding the enzyme activity.

[0095] While methods of increasing the secretion of the recombinant proteins hGCSF and TNFRII-Fc in yeast cells lacking vacuolar sorting activity are shown herein for example, one skilled in the art will recognize that higher levels of any recombinant protein can be achieved through the methods of the present invention, which utilize genetically modified fungal or yeast host cells lacking or comprising reduced vacuolar sorting activity, relative to levels of the recombinant protein produced in wild-type cells. Recombinant proteins comprising an amino acid sequence with homology to the “QRPL” consensus Vps 10 binding sequence can bind to Vps10 in the host cell, leading to alternative trafficking to the vacuole and ultimately reducing protein yield. As discussed in Example 13, van Voorst and colleagues (J Biol Chem 271: 841-6 (1996)) performed mutagenesis of the Cpy “QRPL” peptide near the amino terminus to determine the requirement for sequence conservation to the efficiency of vacuolar sorting. Their analysis revealed that, other than at position Gln²⁴, multiple substitutions could be made without affecting the interaction with Vps10 or leading to missorting. Thus, recombinant proteins do not require absolute homology to the QRPL consensus sequence in order to interact with Vps10 in the host cell, thereby causing a lower yield. Additionally, the S. cerevisiae vacuolar sorting receptor Vps 10 was shown to interact with recombinant proteins, such as E. coli β-lactamase, in an unknown mechanism not involving a “QRPL-like” sorting domain (Holkeri and Makarow, FEBS Lett 429: 162-6 (1998)). Because of the broad potential of recombinant proteins interacting with Vps10 or a Vps10 homolog in the desired host cell, embodiments of the present invention provide broad methods of increasing recombinant yield for a wide range of recombinant proteins, such as therapeutic or biologic protein products through the inactivation or functional deletion of Vps10.

[0096] One skilled in the art can easily test for increased protein titers by transforming an expression vector comprising a nucleotide sequence encoding the desired protein into a wild-type yeast or fungal host cell and a host cell of the same species lacking functional Vps10 protein activity and testing for protein expression by, for example, an ELISA assay, a Western blot, a functional activity assay, or any other standard protein detection assay.

[0097] In particular aspects of this embodiment of the invention, vacuolar sorting activity is eliminated or reduced from the desired host cell by altering the localization of Vps 10 and/or Vps10 homolog proteins, including P. pastoris Vps10-1, to their site of action in the late Golgi. It is known that in S. cerevisiae, Vps 10 localizes to the late Golgi via protein-protein interactions in the cytoplasmic tail at the carboxy-terminus of the protein (Jorgensen et al., Eur J Biochem 260: 461-9 (1999); Cereghino et al., Mol Biol Cell 6: 1089-102 (1995); Cooper et al., J Cell Biol 133: 529-41, (1996); Dennes et al., J Biol Chem 277: 12288-93 (2002)). Thus, in accordance with the invention, vacuolar sorting activity may be eliminated by single amino acid mutations and/or deletions in the Vps10 cytoplasmic tail, which would alter the localization of Vps10 and prevent sorting of the recombinant protein to the vacuole.

[0098] Therefore, this embodiment of the invention relates to methods for producing a recombinant protein in a yeast or fungal host cell comprising: (a) transforming a genetically modified yeast or fungal host cell with an expression vector encoding the protein to produce a host cell, wherein the genetically modified yeast or fungal cell lacks vacuolar sorting activity or has decreased vacuolar sorting activity relative to an unmodified yeast or fungal host cell of the same species, wherein the genetically modified host cell comprises an alteration of the Vps10 cytoplasmic domain that alters its normal trafficking patterns; (b) culturing the transformed host cell in a medium under conditions which induce expression of protein; and (c) isolating the protein from the transformed host cell or culture medium.

[0099] In still other embodiments of the invention, vacuolar sorting activity is reduced or eliminated from the host cell by genetic alterations that functionally delete one or more genes that encode proteins that are associated with the CPY vacuolar sorting pathway, including Gga1, Gga2 (Dell'Angelica et al., J Cell Biol 149: 81-94 (2000)), Mvp1 (Bonangelino et al., Mol Biol Cell 13: 2486-501 (2002)), Pep12 (Robinson et al., Mol Cell Biol 8: 4936-48 (1988)), Vps1, Vps8, Vps9, Vps10, Vps15, Vps21 (Robinson et al., supra), Vps19 (Weisman, L. S. & Wickner, W. J Biol Chem 267: 618-23 (1992)), Vps34 (Schu et al., Science 260: 88-91 (1993)), Vps38 (Rothman et al., Embo J 8: 2057-65 (1989)), Vps45 (Bryant et al., Eur J Cell Biol 76: 43-52 (1998)), and Vti1 (von Mollard et al., J Cell Biol 137: 1511-24 (1997)). Amino acid sequences of proteins associated with the CPY vacuolar sorting pathway are provided herein (see FIG. 25).

[0100] In further embodiments of the invention, vacuolar sorting activity is reduced or eliminated from the host cell by genetic alterations that functionally delete one or more genes that encode proteins that are associated with the recycling of Vps 10 to the late Golgi from the PVC (Seaman et al., J Cell Biol 137: 79-92, (1997); Mullins et al. Bioessays 23: 333-43 (2001)), including Grd19 (Hettema et al. Embo J 22: 548-57 (2003)), Rgp1, Ric1 (Bonangelino et al. Mol Biol Cell 13: 2486-501 (2002)), Vps5, Vps17, Vps26 (Robinson et al., Mol Cell Biol 8: 4936-48 (1988)), Vps29 (Rothman et al., Embo J 8: 2057-65 (1989)), Vps30, Vps35 (Robinson et al., supra), Vps51 (Conibear et al., Mol Biol Cell 14: 1610-23 (2003)), Vps52, Vps53 and Vps54 (Conibear et al., Mol Biol Cell 11: 305-23 (2000)). Amino acid sequences of proteins associated with the recycling of Vps 10 are provided herein (see FIG. 26).

[0101] In still further embodiments, vacuolar sorting activity is reduced or eliminated from the host cell by genetic alterations that functionally delete genes that encode proteins associated with proper MVB function and/or fusion to the vacuole, including: Ccz1 (Kucharczyk et al., J Cell Sci 113 Pt 23: 4301-11 (2000)), Fab1 (Yamamoto et al., Mol Biol Cell 6: 525-39 (1995)), Hse1 (Bilodeau et al., J Cell Biol 163: 237-43 (2003)), Mrl1 (Bonangelino et al., Mol Biol Cell 13: 2486-501 (2002)), Vam3 (Nichols et al., Nature 387: 199-202 (1997)), Vps2, Vps3, Vps4 (Robinson et al., supra), Vps11 (Rothman et al., supra), Vps13, Vps16, Vps18 (Robinson et al., supra), Vps20 (Yeo et al., J Cell Sci 116: 3957-70 (2003)), Vps22, Vps23, Vps24, Vps25, Vps27, Vps28, Vps31, Vps32, Vps33, Vps36 (Robinson et al., supra), Vps37, Vps39 (Rothman et al., supra), Vps41 (Nakamura et al., J Biol Chem 272: 11344-9 (1997)), Vps43 (Sato et al., Mol Cell Biol 18: 5308-19 (1998)), Vps44 (Bowers et al., Mol Biol Cell 11: 4277-94 (2000)), Vps46 (Amerik et al., Mol Biol Cell 11: 3365-80 (2000)), Vta1 (Yeo et al., supra), and Ypt7 (Tsukada et al., J Cell Sci 109 (Pt 10): 2471-81 (1996)). Amino acid sequences of proteins associated with proper MVB function and/or fusion to the vacuole are provided herein (see FIG. 27).

[0102] In alternative embodiments of the methods described herein, vacuolar sorting activity is reduced or eliminated from the host cell by genetic alterations that functionally delete one or more genes that encode proteins required for proper Cpy vacuolar targeting through unknown mechanisms, including: Vps61, Vps62, Vps63, Vps64, Vps65, Vps66, Vps68, Vps69, Vps70, Vps71, Vps72, Vps73, Vps74, and Vps75 (Bonangelino et al., Mol Biol Cell 13: 2486-501 (2002)). Amino acid sequences of proteins associated with proper Cpy vacuolar targeting through unknown mechanisms are provided herein (see FIG. 28).

[0103] The invention also relates to methods for increasing the yield of heterologous proteins produced in yeast cells by eliminating or reducing vacuolar sorting activity, wherein vacuolar sorting activity is abrogated or disrupted by means of a chemical, peptide, or protein inhibitor. In this aspect of the invention, a peptide inhibitor can be utilized that blocks Vps10, Vps10-1 or other homolog of Vps10, for example, a peptide of Pro-Cpy can be expressed while expressing the heterologous protein of interest. The Pro-Cpy peptides will bind to and saturate Vps10-1, thereby preventing binding of the heterologous protein. Chemical inhibitors are also useful for abrogating vacuolar sorting activity. In preferred embodiments of this aspect of the invention, the chemical inhibitor is a small chemical inhibitor referred to as a sortie. It is known that sortins interfere with the vacuolar delivery of proteins in plants and yeast (Norambuena et al., BMC Chem Biol 8: 1 (2008); Zouhar et al. Proc Natl Acad Sci USA 101: 9497-501 (2004)). In accordance with the invention, sortins are added to the cell culture, for example, during yeast fermentation, thereby increasing yield of the heterologous protein of interest through elimination of vacuolar sorting and degradation. One skilled in the art will realize that the sortins should then be cleared from the purified recombinant protein when using this method for therapeutic protein production.

[0104] The invention further relates to a method of increasing the yield of heterologous protein production, wherein the heterologous protein comprises a Vps10 binding site, comprising introducing a modification to the amino acid sequence of the heterologous protein which prevents binding of the protein to S. cerevisiae Vps 10 or a Vps 10 homolog such as P. pastoris Vps10-1. As described in Example 13, recombinant proteins which comprise a “QRPL-like” sorting signal would likely bind to Vps10 if the sorting peptide was surface exposed and direct the recombinant protein to the yeast vacuole. Previous methods for eliminating vacuolar sorting activity, described supra, include methods that target Vps 10 through genetic inactivation of a gene that encodes Vps10 or a Vps10 homolog. In the alternative embodiment described here, the recombinant protein or gene encoding the recombinant protein itself is mutated to prevent binding to Vps 10 or a Vps 10 homolog such as Vps 10-1. Consistent with the paper by van Voorst et al. (J. Biol. Chem. 271:841-6 (1996), the Gln residue of the Gln-Arg-Pro-Leu (SEQ ID NI:176) Vps10 sorting signal is targeted for disruption in this embodiment of the invention because this residue is required for Vps10 interaction.

[0105] Thus, the invention also relates to a modified recombinant protein comprising a “QRPL-like” sorting signal, wherein the Q residue of the “QRPL-like” sorting signal is modified, either by deletion or substitution.

[0106] In other aspects, the invention relates to methods of producing higher levels of a modified recombinant protein comprising a QRPL-like sorting signal relative to the unmodified protein; the method comprising (1) expressing a modified nucleotide sequence encoding the protein in a yeast or fungal host cell in culture medium under conditions which favor expression of the protein; wherein the nucleotide sequence is mutated such that the QRPL-like sorting signal of the recombinant protein is rendered nonfunctional; and (2) isolating the protein from the host cell or culture medium.

[0107] Any fungal or yeast strain can be used as the basis for developing a genetically modified host cell for use in the methods of the present invention. Said genetically modified host cell is modified by inactivating vacuolar sorting activity, for example, by functionally deleting Vps 10 or a Vps 10 homolog, such as by deleting or disrupting a gene encoding the Vps 10 or Vps 10 protein homolog.

[0108] Yeast host cells useful in the methods of the present invention include, but are not limited to: Pichia pastoris, Saccharomyces cerevisiae, Saccharomyces pombe, Candida albicans, Candida glabrata, Pichia stipitis, Hansenula polymorpha, Kluyvermyces fragilis, Kluyveromyces sp., Kluveromyces lactis, Schizosaccharomyces pombe, Pichia finlandica, Pichia trehalophila, Pichia koclamae, Pichia thermotolerans, Pichia salictaria, Pichia minuta (Ogataea minuta, Pichia lindneri), Pichia guercuum, Pichia pijperi, Pichia sp., Saccharomyces sp., Pichia membranaefaciens, Pichia opuntiae, and Pichia methanolica.

[0109] Additional fungal host cells useful in the methods described herein include Aspergillus nidulans, Aspergillus niger, Aspergillus oryzae, Trichoderma reesei, Chrysosporium lucknowense, Fusarium sp., Fusarium gramineum, Fusarium venenatum, and Neurospora crassa.

[0110] In preferred embodiments of the methods described herein, the yeast or fungal host cell is selected from the group consisting of: Pichia pastoris, Saccharomyces cerevisiae, Aspergillus niger, Saccharomyces pombe, Candida albicans, Candida glabrata, Pichia stipitis, Debaryomyces hansenii, Kluyveromyces lactis, and Hansenula polymorpha. In further preferred embodiments, the host cell is a Pichia cell. In some preferred embodiments, the host cell is Pichia pastoris or Saccharomyces cerevisiae. In specific embodiments, the host cell is Pichia pastoris.

[0111] In other aspects, the invention relates to a modified fungal host cell which comprises a functional deletion or knock-out of Vps10 activity, wherein the host cell comprises an expression vector comprising a sequence of nucleotides that encodes a heterologous protein.

[0112] In a particular embodiment, the invention relates to a Pichia pastoris cell lacking vacuolar sorting activity or having reduced vacuolar sorting activity relative to a wild-type Pichia pastoris cell, wherein the host cell comprises a functional deletion of a Vps10-1 protein, for example, the Vps10-1 set forth in SEQ ID NO:20. The Pichia pastoris cell may be further modified by transforming the cell with an expression vector that comprises a sequence of nucleotides that encodes a heterologous protein, such as a biologic or therapeutic protein, to produce a modified host cell. Said cells are useful to produce high titers of the heterologous protein by increasing its secretion efficiency. In preferable embodiments of this aspect of the invention, the host cell comprises a VPS10-2 gene, for example the VPS10-2 set forth in SEQ ID NO:21 that is not deleted.

[0113] In further embodiments of the invention, the heterologous protein produced in the host cell is a glycoprotein. In said embodiments, it may be useful to further modify the host cell in order to produce a glycoprotein in which the glycosylation pattern is human-like, as described, infra.

[0114] The modified yeast host cells of the present invention, which lack vacuolar sorting activity or have reduced vacuolar sorting activity relative to an unmodified yeast cell of the same species, may be further modified to express glycoproteins in which the glycosylation pattern is human-like or humanized. Modifying the yeast host cell in this manner can be achieved by eliminating selected endogenous glycosylation enzymes and/or supplying exogenous enzymes as described by for example, Gerngross, U.S. Pat. No. 7,029,872 and Gerngross et al., U.S. Published Application No. 20040018590. For example, a host cell can be selected or engineered to be depleted in 1,6-mannosyl transferase activities (e.g., ΔOCH1), which would otherwise add mannose residues onto the N-glycan on a glycoprotein.

[0115] In one embodiment, the host cell further includes an α1,2-mannosidase catalytic domain fused to a cellular targeting signal peptide not normally associated with the catalytic domain and selected to target the α1,2-mannosidase activity to the ER or Golgi apparatus of the host cell where it can operate optimally. These host cells produce glycoproteins comprising a Man₅GlcNAc₂ glycoform. For example, U.S. Pat. No. 7,029,872 and U.S. Published Patent Application Nos. 2004/0018590 and 2005/0170452 disclose lower eukaryote host cells capable of producing a glycoprotein comprising a Man₅GlcNAc₂ glycoform.

[0116] In a further embodiment, the host cell further includes a GlcNAc transferase I (GnT I) catalytic domain fused to a cellular targeting signal peptide not normally associated with the catalytic domain and selected to target GlcNAc transferase I activity to the ER or Golgi apparatus of the host cell where it can operate optimally. These host cells produce glycoproteins comprising a GlcNAcMan₅GlcNAc₂ glycoform. U.S. Pat. No. 7,029,872 and U.S. Published Patent Application Nos. 2004/0018590 and 2005/0170452 disclose lower eukaryote host cells capable of producing a glycoprotein comprising a GlcNAcMan₅GlcNAc₂ glycoform.

[0117] In yet another embodiment, the host cell further includes a mannosidase II catalytic domain fused to a cellular targeting signal peptide not normally associated with the catalytic domain and selected to target mannosidase II activity to the ER or Golgi apparatus of the host cell where it can operate optimally. These host cells produce glycoproteins comprising a GlcNAcMan₃GlcNAc₂ glycoform. U.S. Pat. No. 7,029,872 and U.S. Published Patent Application No. 2004/0230042 discloses lower eukaryote host cells that express mannosidase II enzymes and are capable of producing glycoproteins having predominantly a GlcNAc₂Man₃GlcNAc₂ glycoform.

[0118] In a further embodiment, the host cell further includes GlcNAc transferase II (GnT II) catalytic domain fused to a cellular targeting signal peptide not normally associated with the catalytic domain and selected to target GlcNAc transferase II activity to the ER or Golgi apparatus of the host cell where it can operate optimally. These host cells produce glycoproteins comprising a GlcNAc₂Man₃GlcNAc₂ glycoform. U.S. Pat. No. 7,029,872 and U.S. Published Patent Application Nos. 2004/0018590 and 2005/0170452 disclose lower eukaryote host cells capable of producing glycoproteins comprising a GlcNAc₂Man₃GlcNAc₂ glycoform.

[0119] In a further embodiment, the host cell further includes a galactosyltransferase catalytic domain fused to a cellular targeting signal peptide not normally associated with the catalytic domain and selected to target galactosyltransferase activity to the ER or Golgi apparatus of the host cell where it can operate optimally. These host cells produce glycoproteins comprising a GalGlcNAc₂Man₃GlcNAc₂ or Gal₂GlcNAc₂Man₃GlcNAc₂ glycoform, or mixture thereof. U.S. Pat. No. 7,029,872 and U.S. Published Patent Application No. 2006/0040353 discloses lower eukaryote host cells capable of producing glycoproteins comprising a Gal₂GlcNAc₂Man₃GlcNAc₂ glycoform.

[0120] In a further embodiment, the host cell further includes a sialyltransferase catalytic domain fused to a cellular targeting signal peptide not normally associated with the catalytic domain and selected to target sialytransferase activity to the ER or Golgi apparatus of the host cell. These host cells produce glycoproteins comprising predominantly a NANA₂Gal₂GlcNAc₂Man₃GlcNAc₂ glycoform or NANAGal₂GlcNAc₂Man₃GlcNAc₂ glycoform or mixture thereof. It is useful that the host cell further include a means for providing CMP-sialic acid for transfer to the N-glycan. U.S. Published Patent Application No. 2005/0260729 discloses a method for genetically engineering lower eukaryotes to have a CMP-sialic acid synthesis pathway and U.S. Published Patent Application No. 2006/0286637 discloses a method for genetically engineering lower eukaryotes to produce sialylated glycoproteins.

[0121] Any one of the preceding host cells can further include one or more GlcNAc transferase selected from the group consisting of GnT III, GnT IV, GnT V, GnT VI, and GnT IX to produce glycoproteins having bisected (GnT III) and/or multiantennary (GnT IV, V, VI, and IX) N-glycan structures such as disclosed in U.S. Published Patent Application Nos. 2004/074458 and 2007/0037248.

[0122] In still further embodiments, the host cell that produces glycoproteins that have predominantly GlcNAcMan₅GlcNAc₂ N-glycans further includes a galactosyltransferase catalytic domain fused to a cellular targeting signal peptide not normally associated with the catalytic domain and selected to target Galactosyltransferase activity to the ER or Golgi apparatus of the host cell. These host cells produce glycoproteins comprising predominantly the GalGlcNAcMan₅GlcNAc₂ glycoform.

[0123] In a further embodiment, the host cell that produced glycoproteins that have predominantly the GalGlcNAcMan₅GleNAc₂ N-glycans further includes a sialyltransferase catalytic domain fused to a cellular targeting signal peptide not normally associated with the catalytic domain and selected to target sialytransferase activity to the ER or Golgi apparatus of the host cell. These host cells produce glycoproteins comprising a NANAGalGlcNAcMan₅GlcNAc₂ glycoform.

[0124] Various of the preceding host cells further include one or more sugar transporters such as UDP-GlcNAc transporters (for example, Kluyveromyces lactis and Mus musculus UDP-GlcNAc transporters), UDP-galactose transporters (for example, Drosophila melanogaster UDP-galactose transporter), and CMP-sialic acid transporter (for example, human sialic acid transporter). Because Pichia pastoris lacks the above transporters, it is preferable that the Pichia pastoris be genetically engineered to include the above transporters.

[0125] To reduce or eliminate detectable cross reactivity to antibodies against host cell protein, the recombinant glycoengineered yeast host cells can be genetically engineered to eliminate glycoproteins having α-mannosidase-resistant N-glycans by deleting or disrupting one or more of the β-mannosyltransferase genes (e.g., BMT1, BMT2, BMT3, and BMT4) (See, U.S. Published Patent Application No. 2006/0211085) and glycoproteins having phosphomannose residues by deleting or disrupting one or both of the phosphomannosyl transferase genes PNO1 and MNN4B (See for example, U.S. Pat. Nos. 7,198,921 and 7,259,007), which in further aspects can also include deleting or disrupting the MNN4A gene. Disruption includes disrupting the open reading frame encoding the particular enzymes or disrupting expression of the open reading frame or abrogating translation of RNAs encoding one or more of the β-mannosyltransferases and/or phosphomannosyltransferases using interfering RNA, antisense RNA, or the like. The host cells can further include any one of the aforementioned host cells modified to produce particular N-glycan structures.

[0126] Regulatory sequences which may be used in the practice of the methods disclosed herein include signal sequences, promoters, and transcription terminator sequences. Examples of promoters include promoters from numerous species, including but not limited to alcohol-regulated promoter, tetracycline-regulated promoters, steroid-regulated promoters (e.g., glucocorticoid, estrogen, ecdysone, retinoid, thyroid), metal-regulated promoters, pathogen-regulated promoters, temperature-regulated promoters, and light-regulated promoters. Specific examples of regulatable promoter systems well known in the art include but are not limited to metal-inducible promoter systems (e.g., the yeast copper-metallothionein promoter), plant herbicide safner-activated promoter systems, plant heat-inducible promoter systems, plant and mammalian steroid-inducible promoter systems, Cym repressor-promoter system (Krackeler Scientific, Inc. Albany, N.Y.), RheoSwitch System (New England Biolabs, Beverly Mass.), benzoate-inducible promoter systems (See WO2004/043885), and retroviral-inducible promoter systems. Other specific regulatable promoter systems well-known in the art include the tetracycline-regulatable systems (See for example, Berens & Hillen, Eur Biochem 270: 3109-3121 (2003)), RU 486-inducible systems, ecdysone-inducible systems, and kanamycin-regulatable system. Lower eukaryote-specific promoters include but are not limited to the Saccharomyces cerevisiae TEF-1 promoter, Pichia pastoris GAPDH promoter, Pichia pastoris GUT1 promoter, PMA-1 promoter, Pichia pastoris PCK-1 promoter, and Pichia pastoris AOX-1 and AOX-2 promoters.

[0127] Examples of transcription terminator sequences include transcription terminators from numerous species and proteins, including but not limited to the Saccharomyces cerevisiae cytochrome C terminator; and Pichia pastoris ALG3 and PMA1 terminators.

[0128] Yeast selectable markers include drug resistance markers and genetic functions which allow the yeast host cell to synthesize essential cellular nutrients, e.g. amino acids. Drug resistance markers which are commonly used in yeast include chloramphenicol, kanamycin, methotrexate, G418 (geneticin), Zeocin, and the like. Genetic functions which allow the yeast host cell to synthesize essential cellular nutrients are used with available yeast strains having auxotrophic mutations in the corresponding genomic function. Common yeast selectable markers provide genetic functions for synthesizing leucine (LEU2), tryptophan (TRP1 and TRP2), praline (PRO1), uracil (URA3, URA5, URA6), histidine (HIS3), lysine (LYS2), adenine (ADE1 or ADE2), and the like. Other yeast selectable markers include the ARR3 gene from S. cerevisiae, which confers arsenite resistance to yeast cells that are grown in the presence of arsenite (Bobrowicz et al., Yeast, 13:819-828 (1997); Wysocki et al., J. Biol. Chem. 272:30061-30066 (1997)).

[0129] A number of suitable integration sites include those enumerated in U.S. Published application No. 2007/0072262 and include homologs to loci known for Saccharomyces cerevisiae and other yeast or fungi. Methods for integrating vectors into yeast are well known, for example, See U.S. Pat. No. 7,479,389, PCT Published Application No. WO2007136865, and PCT/US2008/13719. Examples of insertion sites include, but are not limited to, Pichia ADE genes; Pichia TRP (including TRP1 through TRP2) genes; Pichia MCA genes; Pichia CYM genes; Pichia PEP genes; Pichia PRB genes; and Pichia LEU genes. The Pichia ADE1 and ARG4 genes have been described in Lin Cereghino et al., Gene 263:159-169 (2001) and U.S. Pat. No. 4,818,700, the HIS3 and TRP1 genes have been described in Cosano et al., Yeast 14:861-867 (1998), HIS4 has been described in GenBank Accession No. X56180.

[0130] All publications mentioned herein are incorporated by reference for the purpose of describing and disclosing methodologies and materials that might be used in connection with the present invention. Nothing herein is to be construed as an admission that the invention is not entitled to antedate such disclosure by virtue of prior invention.

[0131] Having described preferred embodiments of the invention with reference to the accompanying drawings, it is to be understood that the invention is not limited to those precise embodiments, and that various changes and modifications may be effected therein by one skilled in the art without departing from the scope or spirit of the invention as defined in the appended claims.

[0132] The following examples illustrate, but do not limit the invention.

### Materials and Methods:

### Example 1

### Strains and Media.

[0133] K coli strain TOP10 was used for recombinant DNA work. All primers and plasmids and selected Pichia pastoris strains used in this study are listed in FIGS. 10 and 11. Protein expression was carried out with buffered glycerol-complex medium (BMGY) and buffered methanol-complex medium (BMMY). BMGY medium consisted of 2% martone, 100 mM potassium phosphate buffer at pH 6.0, 1.34% yeast nitrogen base, 0.00002% biotin, and 2% glycerol as a growth medium. BMMY contained the same components as BMGY, except 1% methanol was used as an induction medium instead of glycerol. YMD medium consisted of 2% martone, 2% dextrose and 2% agar and was used to grow Pichia pastoris strains on agar plates. Restriction and modification enzymes were purchased from New England BioLabs (Beverly, Mass.). Oligonucleotides were obtained from Integrated DNA Technologies (Coralville, Iowa). Salts and buffering agents were obtained from Sigma (St. Louis, Mo.).

### Example 2

### Transformation of Yeast Strains.

[0134] Yeast transformations with expression/integration vectors were as discussed, infra (Cregg et al., Mol. Biotechnol. 16: 23-52 (2000)). Pichia pastoris strains were grown in 50 mL YMD media overnight to an OD ranging from 0.2 to 6.0. After incubation on ice for 30 minutes, cells were pelleted by centrifugation at 2500-3000 rpm for 5 minutes. The media was removed and the cells were washed three times with ice cold sterile 1M sorbitol. The cell pellet was then resuspended in 0.5 ml ice cold sterile 1M sorbitol. Ten 4 linearized DNA (1-10 μg) and 100 μL cell suspension were combined in an electroporation cuvette and incubated for 5 minutes on ice. Electroporation was performed using a Bio-Rad GenePulser Xcell (Bio-Rad Laboratories, Hercules, Calif.), following a preset Pichia pastoris protocol (2 kV, 25 μF, 200Ω). Immediately following electroporation, 1 mL YMDS recovery media (YMD media plus 1 M sorbitol) was added to the mixture. The transformed cells were allowed to recover for a length of time ranging from four hours to overnight at room temperature (26° C.). After cell recovery, the cells were plated on selective media.

### Example 3

[0135] Identification of Vps10 Homologs in P. pastoris.

[0136] Protein sequences of the four Vps10 homologs (Vps10p/Pep1p/Vpt1p (SEQ ID NO:22), Vth1p (SEQ ID NO:23), Vth2p (SEQ ID NO:24), and YNR065c (SEQ ID NO:25)) in S. cerevisiae were obtained from Genbank®. As discussed in Example 14, potential VPS10 gene homologs were identified in Pichia pastoris using the four S. cerevisiae proteins (above) in a TBLASTN computational search (Altschul et al., J. Mol. Biol. 215(3): 403-10 (1990); Altschul et al., Nucleic Acids Res. 25:3389-3402 (1997)) of a proprietary Pichia pastoris genome. Two Pichia gene homologs, named VPS10-1 and VPS10-2, were identified. Genomic DNA sequences for VPS10-1 (SEQ ID NO:14) and VPS10-2 (SEQ ID NO:15) are provided in FIGS. 13 and 14, respectively. Translated protein sequences for Vps10-1p (SEQ ID NO:20) and Vps10-2p (SEQ ID NO:21) are provided in FIGS. 15 and 16, respectively. A comparison of the amino acid sequences of the P. pastoris Vps10p homologs to S. cerevisiae Vps10p, as well as to other fungal strains, is shown in FIG. 12.

### Example 4

### Generation of Gene Deletion Plasmids.

[0137] The plasmid pGLY5192 was constructed to delete the open reading frame of the VPS10-1 gene (see FIG. 1) and create a yeast strain deficient in vacuolar sorting receptor (Vps10-1p) activity. To generate the vps10-1Δ knock-out plasmid pGLY5192, the upstream 5′ flanking region was first amplified using routine PCR conditions with primers MAM338 (SEQ ID NO:1) and MAM339 (SEQ ID NO:2) and Pichia pastoris NRRL-Y11430 strain genomic DNA as template. The nucleotide sequence of the Pichia pastoris VPS10-1 genomic region, including upstream homologous fragment, promoter, open reading frame (nucleotides 1610-6238), and downstream homologous fragment is provided in FIGS. 13A-13G and SEQ ID NO:14.

[0138] The resulting PCR fragment was cloned into pGLY22b using restriction enzymes SacI and PmeI to generate pGLY5191. The downstream 3′ flanking region was amplified with primers MAM340 (SEQ ID NO:3) and MAM341 (SEQ ID NO:4) and Pichia pastoris NRRL-Y11430 strain genomic DNA as template. The resulting fragment was cloned into pGLY5191 using restriction enzymes SalI and SwaI to generate pGLY5192. Both upstream 5′ and downstream 3′ fragments of pGLY5192 were sequenced to verify fidelity.

[0139] The plasmid pGLY5194 was constructed to delete the open reading frame of the VPS10-2 gene (see FIG. 1) and create a yeast strain deficient in vacuolar sorting receptor homolog (Vps10-2p) activity. To generate the vps10-2Δ knock-out plasmid pGLY5194, the upstream 5′ flanking region was first amplified using routine PCR conditions with primers MAM439 (SEQ ID NO:5) and MAM343 (SEQ ID NO:6) and Pichia pastoris NRRL-Y11430 strain genomic DNA as template. The nucleotide sequence of the Pichia pastoris VPS10-2 genomic region, including upstream homologous fragment, promoter, open reading frame (nucleotides 830-4509), and downstream homologous fragment is provided in FIGS. 14A-14E and SEQ ID NO:15.

[0140] The resulting fragment was cloned into pGLY22b using restriction enzymes SacI and PmeI to generate pGLY5193. The downstream 3′ flanking region was amplified with primers MAM440 (SEQ ID NO:7) and MAM345 (SEQ ID NO:8) and Pichia pastoris NRRL-Y11430 strain genomic DNA as template. The resulting fragment was cloned into pGLY5193 using restriction enzymes SphI and SwaI to generate pGLY5194. Both upstream and downstream fragments of pGLY5194 were sequenced to verify fidelity.

### Example 5

[0141] Generation of a Pichia pastoris Strain Expressing GCSF.

[0142] DNA encoding the Homo sapiens granulocyte-cytokine stimulatory factor protein (GCSF, Genbank NP_{—}757373) was synthesized by DNA2.0, Inc. (Menlo Park, Calif.) and inserted into a pUC19 plasmid to make a plasmid designated pGLY4316 (see FIG. 2, SEQ ID NO:16 and SEQ ID NO:168).

[0143] A subsequent plasmid was constructed that contained GCSF, amplified using routine PCR conditions from pGLY4316 with primers MAM227 (SEQ ID NO:10) and MAM228 (SEQ ID NO:11). PCR primer MAM27 introduced XhoI and MlyI restriction sites at the 5′ end of the DNA encoding the mature GCSF protein (GCSFp) and an FseI site at the 3′ end of the DNA encoding GCSFp. A DNA fragment encoding a mating factor-IL1β signal peptide (Han et al., Biochem. Biophys. Res. Commun. 18; 337(2):557-62. (2005); Lee et al., Biotechnol Prog. 15(5):884-90 (1999)) that directs the GCSF to the secretory pathway was removed from plasmid pGLY4321 with EcoRI and MlyI digestion. The PCR amplified product was digested with FseI and MlyI and was triple-ligated with the signal peptide encoding fragment into plasmid pGLY1346 digested with EcoRI and FseI to make plasmid pGLY4335 (See FIG. 2) in which the 5′ end of the open reading frame (ORF) encoding the mature GCSF was ligated in frame with the 3′ end of the ORF encoding the signal peptide and which produces a fusion protein in which the N-terminus of the mature GCSF is fused to the C-terminus of the signal peptide.

[0144] The GCSF open reading frame was amplified from pGLY4335 by PCR using primers MAM281 (SEQ ID NO:9) and MAM228 (SEQ ID NO:11). The PCR amplified product was digested with the MlyI and FseI restriction enzymes (FIG. 2). Primer MAM281 contains an ATG codon in frame with the GCSF ORF. Thus, the resulting digested amplified PCR product contains an in-frame addition of the ATG translation start codon to the 5′ end of the open reading frame (ORF) encoding the mature GCSF. The resulting fragment contained an in-frame addition of “ATG” nucleotides, which encodes an N-terminal methionine, identical to the Neupogen® (filgrastim, Amgen Inc., Thousand Oaks, Calif.) protein sequence (SEQ ID NO:172).

[0145] The P. pastoris CLP1 gene (SEQ ID NO:17) was amplified using routine PCR conditions from chromosomal DNA from Pichia pastoris strain NRRL-Y11430 using primers MAM304 (SEQ ID NO:12) and MAM305 (SEQ ID NO:13) and digested with EcoRI and StuI restriction enzymes. A three piece ligation reaction was performed with the EcoRI/StuI digested fragment encoding the P. pastoris CLP1 (PpCLP1), the MlyI/FseI digested fragment encoding the rHuMetGCSF, and plasmid pGLY1346 (digested with EcoRI and FseI) to generate plasmid pGLY5178 as shown in FIG. 2. The insert DNA was sequenced to verify fidelity. Also contained within the pGLY5178 plasmid is the AOX1 (alcohol oxidase) promoter, which drives expression of the complete ORF of the CLP1-GCSF fusion, which includes the complete PpClp1 protein sequence followed by the linker sequence “GGGSLVKR” (SEQ ID NO: 175) and rhMet-GCSF (SEQ ID NOs: 18 and 170). Upon DNA transcription in methanol-containing media, the transcribed mRNA enters the endoplasmic reticulum by the Clp1p signal peptide. The polypeptide is further processed in the Golgi apparatus by the Kex2 protease, which cleaves after the arginine residue in the linker sequence; releasing the two proteins of Clp1 and Met-GCSF to the supernatant fraction (see US 2006/0252069). Protein sequences of processed and secreted Clp1 and Met-GCSF are provided in SEQ ID NO:171 and 172. To express Met-GCSF, plasmid pGLY5178 was linearized with restriction enzyme PmeI and used to transform strain YGLY8069 by roll-in single crossover homologous recombination to generate strain yGLY8538 (see FIG. 4). The strain contains several copies of the expression cassette encoding the rHuMetGCSF integrated into the AOX1 locus. The strain secretes rHuMetGCSF into the medium. The genotype of strain YGLY8538 is ura5Δ::ScSUC2 och1Δ::lacZ bmt2Δ::lacZ/KlMNN2-2 nm n4L IΔ::lacZ/MmSLC35A3 pno1Δ mnn4Δ::lacZ PRO1::lacZ/TrMDSI/FB53 bmt1Δ::lacZ bmt4Δ::lacZ bmt3Δ::lacZ dap2Δ::lacZ-URA5-lacZ ste13Δ::NatR AOX1:Sh ble/AOX1p/CLP1-GGGSLVKR-MetGCSF.

### Example 6

[0146] Generation of yGLY8538 Mutant Strains.

[0147] Generation of isogenic mutant yeast strains from yGLY8538 (see FIG. 4) were performed by homologous recombination as described previously (Nett and Gerngross, Yeast 20: 1279-90 (2003)). Parental ura54 strains were transformed with linearized plasmids containing approximately 1000 bp flanking DNA upstream and downstream of the desired open reading frame. Mutant transformants were selected on URA drop-out plates after gaining the lacZ-URA5-lacZ cassette (Nett and Gerngross, supra) and analyzed by PCR to verify the correct genetic profile. The plasmids pGLY5192 (vps10-1Δ) and pGLY5194 (vps10-2Δ) were used for mutagenesis in this study. A flowchart of mutant strain expansion is shown in FIG. 6.

[0148] Strains yGLY9933 and yGLY10566 resulted from transformation of yGLY8538 with pGLY5192 (vps10-1Δ) and pGLY 5194 (vps10-2Δ), respectively. In addition, a double knock-out (vps10-1Δ/vps10-2Δ) was constructed by counterselection of yGLY9933 to generate yGLY9982. The plasmid pGLY5194 was electroporated in yGLY9982 to generate the resulting strain yGLY10557 with the vps10-1Δ/vps10-2Δ genotype.

### Example 7

[0149] Generation of a Pichia pastoris Strain Expressing TNFRII-Fc.

[0150] DNA encoding the tumor necrosis factor antagonist TNFRII-Fc (U.S. application Ser. No. 61/256,369) was synthesized by GeneArt AG (Regensburg, Germany,). The full protein was TOPO cloned (Invitrogen) to generate pGLY3452. The TNFRII-Fc open-reading frame was released with PvuII and FseI in order to clone with the USA signal peptide, obtained from synthesized oligonucleotides and digested with EcoRI and MlyI, and plasmid backbone pGLY2198 (EcoRI and FseI). A triple ligation and transformation in E. coli generated expression plasmid pGLY3465 (see FIG. 3). The DNA and protein sequences of TNFRII-Fc are provided in SEQ ID NOs: 19 and 174, respectively.

[0151] To express TNFRII-Fc, pGLY3456 was linearized with SpeI and electroporated in strains yGLY8292 (VPS10-1), yGLY9992 (vps10-1Δ), and yGLY9993 (vps10-1Δ). The vps10-1d mutant strains, derived from yGLY8292, were generated using plasmid pGLY5192 as shown in FIG. 5.

### Example 8

### Bioreactor Screening and Fermentation Process.

[0152] Bioreactor Screenings: Bioreactor Screenings for rhGCSF expression were performed in 0.5 L vessels in a SIXFORS multi-fermentation system (ATR Biotech, Laurel, Md.) under the following conditions: pH at 6.5, 24° C., 0.3 standard liters per minute, and an initial stirrer speed of 550 rpm. The initial working volume was 350 mL, which consisted of 330 mL BMGY medium and 20 mL inoculum. IRIS multi-fermenter software (ATR Biotech, Laurel, Md.) was used to linearly increase the stirrer speed from 550 rpm to 1200 rpm over 10 hours, beginning one hour after inoculation. Seed cultures (200 mL of BMGY in a 1 L baffled flask) were inoculated directly from agar plates. The seed flasks were incubated for 72 hours at 24° C. to reach optical densities (0D₆₀₀) between 95 and 100. The fermenters were inoculated with 200 mL stationary phase flask cultures that were concentrated to 20 mL by centrifugation. The batch phase ended on completion of the initial charge glycerol (18-24 h) fermentation and was followed by a second batch phase that was initiated by the addition of 17 mL of glycerol feed solution (50% [w/w] glycerol, 5 mg/L Biotin, 12.5 mL/L PTM1 salts (65 g/L FeSO₄.7H₂O, 20 g/L ZnCl₂, 9 g/L H₂SO₄, 6 g/L CuSO₄.5H₂O, 5 g/L H₂SO₄, 3 g/L MnSO₄.7H₂O, 500 mg/L CoCl₂.6H₂O, 200 mg/L NaMoO₄.2H₂O, 200 mg/L biotin, 80 mg/L NaI, 20 mg/L H₃BO₄)). Upon completion of the second batch phase, as signaled by a spike in dissolved oxygen, the induction phase was initiated by feeding a methanol feed solution (100% MeOH 5 mg/L biotin, 12.5 mL/L PTM1) at 0.6 g/h for 32-40 hours. The cultivation was harvested by centrifugation.

[0153] Platform Fermentation Process:

[0154] Bioreactor cultivations were done in 3 L and 15 L glass bioreactors (Applikon, Foster City, Calif.) and a 40L stainless steel, steam in place bioreactor (Applikon, Foster City, Calif.). Seed cultures were prepared by inoculating BMGY media directly with frozen stock vials at a 1% volumetric ratio. Seed flasks were incubated at 24° C. for 48 hours to obtain an optical density (0D₆₀₀) of 20±5 to ensure that cells are growing exponentially upon transfer. The cultivation medium contained 40 g glycerol, 18.2 g sorbitol, 2.3 g K₂HPO₄, 11.9 g KH₂PO₄, 10 g yeast extract (BD, Franklin Lakes, N.J.), 20 g peptone (BD, Franklin Lakes, N.J.), 4×10⁻³ g biotin and 13.4 g Yeast Nitrogen Base (BD, Franklin Lakes, N.J.) per liter. The bioreactor was inoculated with a 10% volumetric ratio of seed to initial media. Cultivations were done in fed-batch mode under the following conditions: temperature set at 24±0.5° C., pH controlled to 6.5±0.1 with NH₄OH, dissolved oxygen was maintained at 1.7±0.1 mg/L by cascading agitation rate on the addition of O₂. The airflow rate was maintained at 0.7 vvm. After depletion of the initial charge glycerol (40 g/L), a 50% (w/w) glycerol solution (containing 12.5 ml/L of PTM2 salts and 12.5 ml/L of 25XBiotin) was fed exponentially at a rate of 0.08 h⁻¹ starting at 5.33 g/L/hr (50% of the maximum growth rate) for eight hours. Induction was initiated after a 30 minute starvation phase when methanol (containing 12.5 ml/L of PTM2 salts and 12.5 ml/L of 25XBiotin) was fed exponentially to maintain a specific growth rate of 0.01 h⁻¹ starting at 2 g/L/hr.

[0155] For YGLY8538, rHuMetGCSF was generated using high methanol feed rate (ramped the methanol feed rate from 2.33 g/L/hr to 6.33 g/L/hr in a 6 hr period and maintained at 6.33 g/L/hr for the entire course of induction) and by adding 0.68 g/L of Tween 80 into the methanol. Fermentation pH was reduced to 5.0 as a process improvement for this and the following strains.

[0156] For YGLY9933, the high methanol feed rate, 0.68 g/L Tween 80, and fermentation pH 5.0 was utilized.

### Example 9

### Deep-Well Induction Plates.

[0157] Titer improvement of TNFRII-Fc was determined using deep-well plate screening. Transformants were inoculated to 600 μL BMGY and grown at 24° C. for two days in a micro-plate shaker at 840 rpm. The resulting 50 μL seed culture was transferred to two 96-well plates containing 600 μL fresh BMGY per well and incubated for two days at the same culture conditions as above. The two expansion plates were combined to one plate, and then centrifuged for 5 minutes at 1000 rpm. The cell pellets were induced in 600 μL BMMY per well for two days and then the centrifuged 400 μL clear supernatant was analyzed by ELISA.

### Example 10

### GCSF Titer Determination.

[0158] Cleared supernatant fractions were assayed for GCSF titer with a standard ELISA protocol. Briefly, polyclonal anti-GSCF (R&D Systems®, Minneapolis, Minn., Cat#MAB214) was coated onto a 96 well high binding plate (Corning®, Corning, N.Y., Cat#3922), blocked, and washed. An rhGCSF protein standard (R&D Systems®, Cat. #214-CS) and serial dilutions of cell-free supernatant fluid were applied to the above plate and incubated for 1 hour. Following a washing step, monoclonal anti-GCSF (R&D Systems®, Cat#AB-214-NA) was added to the plate and incubated for 1 hour. After washing, an alkaline phosphatase-conjugated goat anti-mouse IgG Fc (Thermo Fisher Scientific®, Waltham, Mass., Cat#31325) was added and incubated for 1 hour. The plate was washed and the fluorescent detection reagent 4-MUPS was added and incubated in the absence of light. Fluorescent intensities were measured on a TECAN fluorimeter (Tecan Group, Ltd., Männedorf, Switzerland) with 340 nm excitation and 465 nm emission properties.

### Example 11

### TNFRII-Fc Titer Determination.

[0159] Cleared supernatant fractions were assayed for TNFRII-Fc titer with a standard ELISA protocol. Briefly, monoclonal anti-human sTNFRII/TNFRSF1B (R&D Systems®, Cat#MAB726) was coated onto a 96 well high binding plate (Corning®, Cat#3922), blocked, and washed. A TNFRII-Fc protein standard (commercial ENBREL®, Amgen, Thousand Oaks, Calif.) and serial dilutions of cell-free supernatant fluid were applied to the above plate and incubated for 1 hour. Following a washing step, polyclonal anti-human sTNFRII/TNFRSF1B (R&D Systems®, Cat#AB-26-PB) was added to the plate and incubated for 1 hour. After washing, an alkaline phosphatase-conjugated donkey anti-goat IgG (Santa Cruz®, Cat#SC-2022) was added and incubated for 1 hour. The plate was washed and the fluorescent detection reagent 4-MUPS was added and incubated in the absence of light. Fluorescent intensities were measured on a TECAN fluorimeter with 340 nm excitation and 465 nm emission properties.

### Example 12

### Cell Lysis Determination.

[0160] Cell lysis was measured by assaying the amount of double-stranded DNA in the fermentation supernatant. The Quant-iT™ PicoGreen® assay kit (Invitrogen Corp., Carlsbad, Calif.) was used to assay for dsDNA according to the manufacturer's suggestions.

### Results:

### Example 13

[0161] Human GCSF and TNFRII-Fc Contain a Canonical Vps10 Binding Sequence.

[0162] In Saccharomyces cerevisiae, the Vps 10 (also known as Pep1 or Vpt1) receptor is responsible for binding pro-carboxypeptidase y (pro-Cpy, also known as Pre1) via a “QRPL-like” sorting signal (Gln²⁴-Arg-Pro-Leu²⁷, SEQ ID NO:176) and transporting pro-Cpy to the vacuole (Marcusson et al. Cell 77: 579-86 (1994); Valls et al. Cell 48: 887-97 (1987)). Previous studies have focused on the sorting of Cpy in S. cerevisiae to examine binding interactions. These studies identified two regions of the Vps10 luminal receptor domain, each with distinct ligand binding affinities (Jorgensen et al. Eur J Biochem 260: 461-9 (1999); Cereghino et al. Mol Biol Cell 6: 1089-102 (1995); and Cooper & Stevens J Cell Biol 133: 529-41 (1996)). Additionally, van voorst and colleagues (J Biol Chem 271: 841-6 (1996)) performed mutagenesis of the Cpy “QRPL” peptide near the amino terminus to determine the requirement for sequence conservation to the efficiency of vacuolar sorting. Their analysis revealed that, other than at position Gln²⁴, multiple substitutions could be made without affecting the interaction with Vps 10 or leading to missorting. The S. cerevisiae Vps10 receptor was also shown to interact with recombinant proteins, such as E. coli β-lactamase, in an unknown mechanism not involving a “QRPL-like” sorting domain (Holkeri and Makarow, FEBS Lett 429: 162-6 (1998)). In S. cerevisiae, previous research identified three additional homologs of Vps10 (Vth1, Vth2, YNR065c, see FIG. 12) with potential sorting activity (Cooper & Stevens J Cell Biol 133: 529-41 (1996); Westphal et al. J Biol Chem 271(20):11865-70 (1996); Tarassov K, et al. Science 320(5882):1465-70 (2008)).

[0163] We identified sequences near the amino termini of recombinant human granulocyte-colony stimulating factor (rhGCSF) and TNFRII-Fc with characteristics of a Vps10 sorting sequence (van Voorst et al (1996), supra). These sequences are “QSFL” (SEQ ID NO:177) for GCSF (see Genbank NP_{—}757373 or SEQ ID NO:168) and “QVAF” (SEQ ID NO:178) for TNFRII-Fc (see SEQ ID NO:174). As shown in Table 1, below, each of the four amino acid positions in the putative Vps10 binding domain of rhGCSF and TNFRII-Fc were compared to previous mutagenesis results for Cpy vacuolar targeting (Tamada et al. Proc Natl Acad Sci USA 103: 3135-40, 11 (2006); van Voorst et al. (1996), supra). When the amino acids of the sorting peptide in rhGCSF and TNFRII-Fc were compared to the respective mutated pro-Cpy protein, all mutations were reported to reveal no less than 85% activity (see FIG. 3 of van Voorst et al. (1996), supra). These data indicate the sorting peptides in rhGCSF and TNFRII-Fc would likely bind to the Vps10 receptor if surface exposed and direct the recombinant protein to the yeast vacuole.

TABLE 1
Possible Vps 10p-binding Motifs

| | | % Relative |
|---|---|---|
| | N-terminal | Efficiency to |
| Protein | Sequence | S.c. Cpy “QRPL” |
| hGCSF | ^{↓}TPLGPASSLPQSFLLK | 100-85-90-100 |
| | (SEQ ID NO: 179) | |
| TNFRII-Fc | ^{↓}LPAQVAFTP | 100-100-90-100 |
| | (SEQ ID NO: 180) | |

[0164] Furthermore, both peptides map to a surfaced-exposed region of the respective protein capable of interacting with Vps10 (Hill et al. Proc Natl Acad Sci USA 90: 5167-71 (1993), Tamada et al. (2006), supra). Based on the likelihood of GCSF and TNFRII-FC binding to the Vps 10 receptor via N-terminal sorting sequences and their surface exposure, we hypothesized that mutations in the P.p. VPS10 homologs would improve secretory yields of rhGCSF and TNFRII-Fc by eliminating vacuolar sorting.

### Example 14

[0165] Homologs of Vps10 in P. pastoris.

[0166] A TBlastN search of the genomic DNA sequence of Pichia pastoris revealed two gene homologs of VPS10 in Pichia pastoris, denoted VPS10-1 and VPS10-2 (see Example 3). A comparison of S. cerevisiae and P. pastoris Vps 10 protein homologs is shown in FIG. 12. Whereas S.c. Vps10 is 1579aa, P.p. Vps10-1 is 29.99% identical (1542aa) and P.p. Vps10-2 is 25.4% identical (1502aa). Alignment between P.p Vps10-1 and Vps10-2 proteins revealed 41.0% similarity and 26.8% identity. Similar to S.c. Vps10, both P. pastoris proteins have a predicted N-terminal signal peptide for entry into the endoplasmic reticulum, two C-terminal rich regions, and a single predicted transmembrane domain near the C-terminus (Horazdovsky et al. Curr Opin Cell Biol 7: 544-51 (1995)) (data not shown).

[0167] As discussed above, alignments of the P. pastoris Vps10 proteins (Vps10-1 and Vps10-p) to the S. cerevisiae Vps10 demonstrated a relatively low 37-43 percent identity; whereas alignments of the other S. cerevisiae Vps10 homologs (Vth1p, Vth2p, YNR065C) to S. cerevisiae Vps10 demonstrated a 58-75 percent identity (FIG. 12). Therefore, based on sequence analysis alone, it could not be determined whether the two P. pastoris Vps10 homologs will function similarly as the S. cerevisiae Vps10.

[0168] Additional fungal Vps10 homologs were identified from GenBank® (National Center for Biotechnology Information (NCBI), Bethesda, Md.) and aligned with S. cerevisiae Vps10 (FIG. 12). The following GenBank® accessions were designated Vps10 homologs: Aspergillus niger (CAK38444, SEQ ID NO:26, FIG. 18), Schizosaccharomyces pombe (CAA16914.1, SEQ ID NO:27, FIG. 19), Candida albicans (EAK91536, SEQ ID NO:28, FIG. 20), Candida glabrata (CAG60842.1, SEQ ID NO:29, FIG. 21), Pichia stipitis (NC_{—}009068.1, SEQ ID NO:30, FIG. 22), Debaryomyces hansenii (XP_{—}002770499., SEQ ID NO:181, FIG. 23), and Kluyveromyces lactis (XP_{—}454425, SEQ ID NO:182, FIG. 24). Data from S. pombe indicates that while the Vps10 receptor has only 23.6 percent identity to S. cerevisiae Vps10, it exhibits similar functions (Iwaki et al. Microbiology 152: 1523-32 (2006); Takegawa et al. Cell Struct Funct 28: 399-417 (2003); Takegawa et al. Curr Genet. 42: 252-9 (2003)). In all, the bioinformatic data suggests the two P. pastoris Vps10 homologs may have a function that is similar to the S. cerevisiae Vps 10 receptor.

### Example 15

[0169] Vps10-1 Activity Reduces rhGCSF Titer.

[0170] The parental rhGCSF expression strain, yGLY8538, utilizes the AOX1 promoter to transcribe GCSF. The parental strain was counterselected using 5-fluoroorotic acid (5-FOA) to generate mutant strains (see FIGS. 6 and 11B). Isogenic mutants (URA5+) of P.p. vps10-1Δ (yGLY9933) and vps10-2Δ (yGLY10566) were generated by electroporation of plasmids pGLY5192 and pGLY5194, respectively (see Examples 1-11, FIG. 1). The effects of vps10-1Δ and vps10-2Δ mutations on rhGCSF secretion were determined using Sixfors fermentors (ATR Biotech, Laurel, Md.) and a GCSF ELISA assay (see Example 10).

[0171] Results revealed that the vps10-1Δ mutant yGLY9933 secreted over seven times as much rhGCSF relative to yGLY8538 (FIG. 7A). Surprisingly, the vps10-2Δ mutant yGLY10566 did not secrete any detectable rhGSCF. Fermentation supernatant from yGLY10566 was subjected to SDS-PAGE analysis to reveal a dramatic ablation of total secreted protein (data not shown). These results indicate that the functions of Vps10-1 and Vps10-2 are not redundant in their interactions with rhGCSF. Titer results from the vps10-1Δ vps10-2Δ double mutant (yGLY10557) demonstrated the vps10-2Δ mutation was dominant over vps10-1Δ mutation, whereby rhGCSF (FIG. 7A) and the majority of all secreted proteins were drastically reduced (not shown). These fermentation samples were also assayed for cell lysis as measured by double-stranded DNA released from cells into the supernatant fraction. Because we have not seen any disclosures of yeast vps10 mutants in fermentation conditions, it was possible that during high biomass fermentation conditions, cell fitness could become compromised if normal vacuolar function was altered. If this were to occur, cells may lyse and release double-stranded DNA into the supernatant fraction. However, data shown in FIG. 7B indicate mutations in vps10-1Δ and/or vps10-2Δ do not induce cell lysis.

### Example 16

### Vps10-1 Activity Reduces TNFRII-Fc Titer.

[0172] Since TNFRII-Fc also contains a putative Vps10 binding motif in the N-terminus, we transformed the expression vector pGLY3465 in cell lineages with and without functional Vps10-1. At least eleven independent transformants were induced for protein expression. ELISA titers were individually calculated, then averaged for each host strain. The relative ELISA titer was determined from average ELISA titers of each host strain divided by the average ELISA titers of the wild-type parental strain yGLY8292. (FIG. 8) This data clearly shows that the vps10-1Δ mutant strains (yGLY9992 and yGLY9993) exhibit approximately ten-fold higher TNFRII-Fc secretion levels than the parental wild-type strain yGLY8292.

### Example 17

[0173] Model of Pichia pastoris Vps10-1 function.

[0174] The data indicates Vps 10-1 is capable of interacting with recombinant proteins transiting the secretory pathway in Pichia pastoris. FIG. 9A illustrates the altered delivery of a recombinant protein to the vacuole with normal function of Vps10-1, using rhGCSF as a model protein. In contrast, FIG. 9B illustrates the efficient secretion of rhGCSF into the supernatant fraction when activity of Vps10-1 is eliminated or reduced. The reduction of Vps10-1 activity thereby renders cells more productive at recombinant protein secretion.

The application's sequence listing, which the Patent Office published only in electronic form, follows.

SEQUENCE LISTING (182 sequences)

SEQ ID NO: 1 - DNA, 42 bp, Artificial Sequence
  PCR primer
gcaaaagtcgacggccaagtgggccagattatataaatatgg

SEQ ID NO: 2 - DNA, 40 bp, Artificial Sequence
  PCR primer
gcaaaaatttaaatttacgctatgaggtttctttcaatcc

SEQ ID NO: 3 - DNA, 39 bp, Artificial Sequence
  PCR primer
gcaaaagtttaaacgacgacgaggagaatatcaattttg

SEQ ID NO: 4 - DNA, 38 bp, Artificial Sequence
  PCR primer
gcaaaagagctcggccggatgggccttgtcgggtcttg

SEQ ID NO: 5 - DNA, 45 bp, Artificial Sequence
  PCR primer
gcaaaagagctcggccaacatggccagattaatcagcctgaaacc

SEQ ID NO: 6 - DNA, 40 bp, Artificial Sequence
  PCR primer
gcaaaagtttaaacttagtagaccaacaatgtcaatgtcc

SEQ ID NO: 7 - DNA, 35 bp, Artificial Sequence
  PCR primer
gcaaaaatttaaatgatatcatcaacagcgaagac

SEQ ID NO: 8 - DNA, 40 bp, Artificial Sequence
  PCR primer
gcaaaagcatgcggccattttggccctcattttgcacatc

SEQ ID NO: 9 - DNA, 43 bp, Artificial Sequence
  PCR primer
ctcgaggagtcctcttatgacaccattaggacctgcttcctcc

SEQ ID NO: 10 - DNA, 36 bp, Artificial Sequence
  PCR primer
ctcgaggagtcctcttacaccattaggacctgcttc

SEQ ID NO: 11 - DNA, 30 bp, Artificial Sequence
  PCR primer
gagctcggccggccttattatggttgagcc

SEQ ID NO: 12 - DNA, 37 bp, Artificial Sequence
  PCR primer
aaaaaagaattccgaaaaatgagcaccctgacattgc

SEQ ID NO: 13 - DNA, 67 bp, Artificial Sequence
  PCR primer
aaaaaaaggcctcttaaccaaagaacctccaccttcgtccgtacgagcacagccggtgatagaagtg

SEQ ID NO: 14 - DNA, 7430 bp, Pichia pastoris
aaactaagtgggccagattatataaatatggatcaacatgaagccttgaaagatttcaaggacaggcttaggaattacgaaaaagtttacgagactattgacgaccaggaggaagaggagaacgaacggtacaatattcagtatctgaagataatcaacgcaggaaagaagatagtcagttataacataaatgggtatttatcgtcccacaccgttttttatctcctgaatttcaatcttgcagaacgtcaaatatggttgacgacgaatggagagacagagtataaccttcaaaataggattggaggtgattccaaattaagcaatgagggatggaaatttgccaaagcattgcccaagtttatagcacagaaaagaaaagagtttcaacttagacagttgaccaaacactatatcgagactcaaacgcccattgaagacgtaccgttggaggagcacaccaagccagtcaaatattctgatctgcatttccatgtttggtcatcggctttaaagagatctactcaatcaacaacattttttccatcggaaaattactctctgaagcaattcagaacgttgaatgatctctgttgcggatcactggatggtttgactgaacaagagttcaaaagtaaatacaaagaagaataccagaattctcagactgataaactgagtttcagtttccctggtatcggtggggagtcttatttggacgtgatcaaccgtttgagaccactaatagttgaactagaaaggttgccagaacatgtcctggtcattacccaccgggtcatagtaaggattttactaggatatttcatgaatttggatagaaatctgttgacagatttggaaattttgcatgggtatgtttattgtattgagccgaaaccttatggtttagacttaaagatctggcagtatgatgaggcggacaacgagtttaatgaagttgataagctggaattcatgaaaagaagaagaaaatcgatcaacgtcaacacgacagatttcagaatgcagttaaacaaagagttgcaacaggacgctctcaataatagtcctggtaataatagtccgggcgtatcatctctatcttcatactcgtcgtcctcttccctttccgctgacgggagcgagggagaaacattaataccacaagtatcccaggcggagagctacaactttgaatttaactctctttcatcatcagtttcatcgttgaaaaggacgacatcttcttcccaacatttgagctccaatcctagttgtctgagcatgcataatgcctcattggacgagaatgacgacgaacatttaatagacccggcttctacagacgacaagctaaacatggtattacaggacaaaacgctaattaaaaagctcaaaagtttactacttgacgaggccgaaggctagacaatccacagttaattttgatactgtactttataacgagtaacatacatatcttatgtaatcatctatgtcacgtcacgtgcgcgcgacattattccgagaacttgcgccctgctagctccactgtcagagtgataacttccccaaaataggatccaactgtttccaattgcttttggaaatgtggattgaaagaaacctcatagcgtctatattactattttcaacttcagcttatgcggcattcaaacccaggatagttaaaaaggaatttgatgaccttttgaatccaatatactttaacgattcatcgacagtactaggtctagtagatcagacgctgttaatttccaacgatgatggaaaatcatggactaacttgcaggaggttattacacctggggaaattgatccgctgacaattgtaaacattgaattcaatccatccgcatctaaggcttttgtattcactgctagtaagcactaccttactttagacaaaggatccacctggaaagaatttcaaattcctcttgaaaaatatggtaacagaatagcctacgacgttgagtttaattttgttaacgaagaacatgcaatcataagaacaaggtcttgcaaacgtcgttttgattgtaaggatgagtatttttattcgttagatgacttgcaaagcgttgacaagatcaccatttctgacgaaattgtcaattgccagttttcacaatcttccactagctcagattcccgcaaaaacgatgccatcacttgcgtaacgcgtaaactggattccaaccgacacttcttggagtcgaacgttctgacaaccttgaactttttcaaggatgttactagcttgcccgccagtgatccattaactaagatgcttatcaaggatatacgtgttgttcaaaattacattgtattgtttgtcagttcggatagatacaacaaatattcacccactcttcttttcatttccaaagatggaaatacgtttaaggaagccagtttaccagattctgaaggtacatcaccgtcggtgcactttttgaaaagtcctaatcccaatttgataagagcaattcggctagggaaaaagaactcactagatggtggtggcttttattcagaagttctacaatctgactctacagggttacactttcacgttcttctggaccacttagaagcaaatttgctttcgtactatcaaatagagaacttagcgaaccttgaaggaatctggattgccaaccaaatcgacacttccagcaagtttggctcaaaatccgttataacatttgatgcaggtttaacgtggtctcctgtgacagtagatgaagacgaagataaaagtttgcacatcattgcgtttgctggtgaaaatagcctttatgagtccaagtttccggtttcgactccaggaattgccttgaggatagggcttattggcgatagtagtgatgcacttgatattggcagctataggacatttttaaccagagatgcagggctaacatggtctcaagtttttgataatgtctctgtttgcggctttggaaactatggaaacatcatattatgctgttcgtatgatccactacttcgatctgagcctttgaaatttcgttattctttggatcaaggtcttaactgggaaagtattgatttaggcttcaacggagtcgctgttggcgttttgaacaatatagacaatagcagtcctcaattccttgtgatgacgattgccacggatggtaagtcttcaaaggctcagcatttcttgtattcagttgatttttctgatgcgtatgagaagaaaatatgtgatgttacaaaagacgaattatttgaagaatggacgggaagaatagatccggtgacgaagctgcctatttgtgttaacggtcacaaggaaaaattcagaagacggaaggctgacgctgaatgcttctctggtgaactttttcaagacctaactccaattgaagagccatgtgattgtgatccggatattgattacgaatgttcgcttggatttgagttcgatgcagagtctaaccgatgtgagccaaatttgtcaatcctgtccagtcactattgtgttgggaaaaacttaaagagaaaagtgaaagtagatagaaagtcgaaagttgcaggcacaaaatgtaaaaaggatgtcaaacttaaggataattctttcactttagactgttccaaaacatctgaaccagatctcagcgagcaaagaattgttagtaccaccataagctttgaaggttctccagtacaatacatttatttgaaacaggggaccaacacaacccttcttgacgaaacagtcattttaagaacatcactacgaactgtgtacgtgtctcataacgggggaacaacttttgatagagttagtatcgaagatgatgtgtcatttattgacatctatacaaaccattactttccagataatgtttatttgatcactgatacagatgagctgtacgtttcggataatagagctatctctttccagaaagttgacatgccttcaagagctggtttggagcttggagttcgagctctaacctttcataagagtgaccctaacaagtttatttggttcggtgagaaagattgtaactctatttttgacagaagttgtcaaacacaagcttatattacggaagacaacggcttatctttcaagcctcttttggaaaatgttagatcatgttactttgttggaacaacttttgattccaagctgtatgattttgacccgaacttaatcttttgcgagcagagagttccaaatcaacgtttcttgaaacttgtagccagtaaggactatttctatgatgacaaagaagagctgtatcctaagattattggaattgctactaccatgagctttgttatcgtagcgactatcaacgaagacaatagatcattgaaggcgtttataaccgcggatgggtctacttttgcggagcaattgtttcctgcagatctggattttggaagagaagtagcgtacacagttattgacaattgggaatcaaaaacacccaatttctttttccatttgacaacttctgaagataaagatttggaatttggagctttactgaaatcaaactacaatggaacaacctatacgcttgctgccaacaatgtcaatagaaacgatagaggttacgttgactatgaaatcgttctaaacttaaacggcattgctctcatcaatacagttattaactcgaaggaacttgaatccgagcagtcccttgaaactgctaaaaaactgaaaactcaaataacgtacaacgacgggtctgaatgggtgtatctgaaaccgccaaccattgattcagaaaagaacaagttttcgtgcgtcaaagataagttgagcttggaaaaatgctcattgaacctcaagggtgccactgatcggccagacagcagagactccatttcttctggttctgctgttggtctactttttggagtaggtaacgttggggaatacctgaaccaagattcatcaggtctagcattgtatttttcgaaggatgcgggcatctcttggaaggagattgccaaaggagattatatgtgggaatttggagatcaaggaacaatcctcgtaattgttgagttcaagaagaaggttgacactttgaaatactcattggatgaaggagaaacgtggttcgactacaagtttgcaaatgaaaaaacatatgttttggacctagcaactgtgccttcagatacttcacggaagttcatcatcctcgccaacagaggcgaggagggagatcatgaaactgttgttcacacaatagacttcagtaaggttcaccagcgtcaatgtttattgaatttacaagatagtaacgctggtgatgatttcgaatattggagtccgaagaacccaagcgctgttgacgggtgtatgctagggcatgaagagtcttacctaaaaaggattgcatcccactcggattgttttattgggaacgcacccctatcagagaaatacaaagtgattaagaactgcgcttgcacaaggagagattacgaatgtgattacaattttgctcttgccaatgatggaacttgtaaattggtggaaggagagtctcctttggattactctgaagtttgtagaagggatccaacttccattgaatattttttgcctactgggtacagaaaggtgggattgagtacttgtgaaggcggactagaactggataattggaatcccgttccatgtccaggaaaaaccagagaattcaatagaaaatacggcaccggcgccaccggatacaagattgtggtcatagtagcagtgcctttattggttctcttgagcgccacttggttcctatatgagaaaggaataaaaaggaatggaggttttgccagatttggagttattcgattaggcgaagatgacgacgatgacttgcaaatgattgaggagaataatactgacaaagtagtcaatgttgtagtgaaaggcctcattcatgcattcagagcagtttttgtgagctatttatttttccgcaaacgtgcggccaagatgtttggtggatcgtccttttcacacagacacatattgcctcaagatgaggatgctcaagcctttttagccagcgacttggagtcagagagtggagagcttttccgatatgcaagcgacgatgacgatgcccgagagattgacagcgtgatcgagggaggaattgatgtcgaagacgacgacgaggagaatatcaattttgattcccggtagatagctcacccacggtcacacacacaaacacacatacacattaacacacagagttattagttaacagagaaaactctaacaaagtatttattttcgttacgtaatccgacttttctttttaccgttttctattgctcctctcatttgcccctaaaagttgctcctcattactaaaatcaccacaccatgctcgaatatgatgttactaaatgcaaattgtagtcgtgcctcttgtggtaatactatagggaatatctctcgattactcgattctggttaattttttctttttttataggggaagtttttttttcttcccctttctctccagtttatttatttactaagaaaatccaacagataccaaccacccaaaaagatcctaaacagcctgtttttgaggagtttttcagcagctaagcttcatcagttttttaatacttaatttattgcccttcactttgtttcttgtggcttttaaggctctccggaacagcggtttcaaaatcaaatctcagttatttgtttgctccgctttgtcagttcaaagatcatggtttccgaaaacaagaatcaatcttcgattttgatggacaactccaagaagctctctccgaagcccattttgaataacaagaatgaaccgtttggcatcggcgtcgatggacttcaacatcctcaaccgactttatgccgcacagaatcggaactcttgttcaacttgagccaagtcaataaatcccaaataactttggacggtgcagttactccacctgctgatggtaatgggaatgaagcaaaaagagcaaatctcatctcttttgatgttccatcgtctcaagtgaaacatagagggtctattagtgcaaggccctcggcagtgaatgtgtcccaaattaccggggccctttctcaatccggatcttctagaaatccctacgatcaaacacagtcacctccacctagcacttacgcctccaggcagaactccacccatggaaataatatcgatagcttgcaatatttggcaacaagagatcttagtgctttaaggctggaaagagatgcttccgcacgagaagctacctcttctgcagtgtccactcctgttcagttcgatgtacccaaacaacatcatctccttcatttagaacaagacccgacaaggcccatccctattgccgacaaaaag

SEQ ID NO: 15 - DNA, 6620 bp, Pichia pastoris
ctgcctaacttcaaaaacatggccagattaatcagcctgaaacctgaagaaaagatcaaacttacggaagctgcaaaagttcttaaagagtttggcttcacgattgagcaagcaaaagatgaaactttcacttacattcaaaaactagttccgccaattgataccgtagtcaattgtcagaacgaattatcgcatcaaaagtcactttgcgcacgagctaatcagattctcccatacattgagattgagttgaaaaggttgaacatcaccaagagacacctaaccgattctgagcaagacttcaagaaactacaaggtacttcaaagagaagaatcacagggttgacctcccctagtaatcgacagtcgcgtgccgcatctcttcaggagggggggcagactcaaaatcagctgggtacctctatagattttttcgccaaatcgctttcccgagatggaagctcaggcagaacgacacctgcacctcagacgaactctcagagaggcaccaccggacgtatttgggtccgttataacgaagggttctcaaatgcagttcgtagaaacatcacatgggaagagctgtggaatttttaaatgtcctccataatttcatgcggaccttgcatagtttatataatcatactgtaccaaccaacatccacacaaggagttttcggcctcaacatattatcgaaaccatctccctgtcccttactcagatcctattttttcttactcaattgaaagaatttacactgctttttccactctctttttgcaactcgaagtcaatccatagaaactctttattttctttcctttgatcatgaggacattgacattgttggtctacttcgtagtggctgccttagctttcaccccgcagaccaactccagaatttttaaaggttacccaaagaaagtggtttattttgacgacactgccagcgttgtctaccatgatggctctgacaatgagatctattattccaaagatgatggtgtcacttggactcaactagatcttggtggggcgtccgctcatcaagtaattgttcacccttttgacccttctactgcctatattttgaccactagtgaaactcacttcgtcaccacagatagcggatttacttggaataaggtttcctctccagagcctccagtaaccaacgagtttccaacgttgagccaagagtcctcctcattgaccctgaattccaagaactttgagtatgttctgtttgcaggccaatgtacagacggatcagaaatttgcaacagaaagtactactattccttggataacatgagaactttcaacgagctcattgaagctcacagctgtttgtttgtcgatactgccgatgccattgcgggtgatcattccccaaacgctgttatctgtgccatcaccaaccctgacggaaaactgtctttggtgaaaaccgccaacttcttcaaagacggcatagactatgtctctagtggtggtggtcttattgagaatcctgaactgctgggcgcctcacacaactacatcttggctgttggttctcatcttttgcacaacaaagacaagtttgtatacatctcatttgatggttcgaacttcaacaaagtgaaactcaatggtaatactaatgatcttaaaattttggactctttaccttcctcagtggccatttcagcagggaacgctctgtttatctcatcgagtggctcgaactctctcaatgatgataacgataacaactatttcaccagcaagctttcctccttgcacgtcaaagacaactttgctgactatgaacttattgatgctgttgagggggtcatacttgcaaacacaaacgaaaatggaaatgttaggtcgttcattagtaccaataatggagactcttggaaaccacttgaattgaagagtggctcacctttacatttgcattctgttatacaaaggtctttatccgataacagagctgatcctggtaaatattattcgactcctgtcccaggtcttcttttgggtgttggtaatgagggccccagcttgaatccatattccaaaggtaatacttatgtttctaccgacgcaggtgcttcttggaccaaaactctcacgggaccgcatatcttcgaagttggagactcaggaagtttgataatcgctattcctcagtctggccctactgatatcatcaagttttccaaggactttggttcatcatggaccactgcaagactgggacagtacataactgctgatttcattaccactactccagatgctacttctttgtcttttttggtagttggtactaacaacgacgataaatatattgcccaagccctgaacttccgaggcgtttatgacactgtctgttcggaatctgaatttgaagattggtacccgattgatagtaaaggcaaaaagatttgtatcatgggacataagcaaaagttttccagaagaaaaccttctgctgcttgttctgttagcaaactttacctagaggcagtttctgttcaggaggactgcccttgtactgagcaggactttgagtgcgctcaaggtttttcaagaaattctcaagggaaatgccttgctgacaacattgaggctgagttggctttacagcgcaagttgtgtgtcaatggcgcaacatcttacgaggtaccatctggttaccagttgatccttggaaatacctgtcaaggaagttccgatttacaaactcctcttcaaaaaagatgccctgatgaaccaaagacagtaccggaagctgaaaacttggatccatcatactcatcatcggatgagaaggatgacaacccagacgaagaagaaggtgctcctgaggattcaaaagaaggtttcaacgatggtaaggttaaagcctctgtgtttacctttgacgggaaagttgaggaatatatctatttggaaagagacaaggaaaatccatcggaagatgaaactctagttgctattacaaacagaaatgaggcgtacgtatcccataaccagggatattcttgggagcaaattgcccctggtgaagatatcttaagtatctacctcagcaggtttgatcgtaaccacgtttacttggtggcagcaaaccagaaaatcatatattccagagatagagcagacaactggaaatctttccgaacccccagtatgccaattccaggtgtccgtcccatctatttccatccttacctcccacattacttgatttatgtaggccaagaaggatgtgattctcagtactcaaaatcatgtcgttcggttgcctatttttcgaaatcttatggtaagcgatggacaccgattcaagaaaatgtgaactcctgccaatttgtgggaggtcttcaaaagagaaaccatgataatctgataatttgtgatagaccagcaaccgattccaatgatttcaaatcgcagattttttggtcgaaagaccttttcaaaaccaaaaccattgcgttagagaacactatcggatttgtgcaagtggctgattatctggtcgctgctacaattgagcataatgatgaacttagagcccatgtatctattgatgggacaacctgggcagatgcttactttccgcctaactttagggttgacaaacaacaagcttacaccacattatctggagctaccaaatcaattttccttcatgttactacgaatcctaggcccaacaccgagttcggcactatactcaagtcaaattcgaatggtacttcttacgttctttctttggataatgtgaacagagattctaaaggatatgttgattttgaacagatgtcagggttagaaggtgttatcattgtaaacactgttgataatgcatctgccgctaaaaagggatctaggaaacaattgaagtcaaagataacctacaatgatggtgcacactggagctatatcaccccccctgcaatcgattcagacggtaacaaatttccttgtaaaggtaaatccctcgagaaatgttctttgaacttgcatggctataccgagagagaagactacagagacacgttctcctctcaatctgctattggtatgatgcttggtgttggaaacgtaggtgaacatctcgaaaattactacgatggacacactttcctaacgaaagatggaggtatcacttggaaggaagtgaagaagggcgtctatcagtgggaatatggtgatcaaggatctgtcattgtccttgtcaacggaaaggataatactaacattctgtactactctgttgatgaaggtgacacgtttgaagaattccaattcactgacgagcttgtcacagtacaagacatttccactgttccaaatgacaactccagaaagtttcttctattcactagagtgccattagctaaaggagataaaaccagagtattccaaatcgatttcagtcacttacttaatcgtaagtgttctttggatttgagaaatgaggacaccgatgattttgaactatggtctccaagtcacccattccagccagacaattgtatgtttggacatgaaactcaatactacagaaaactacctggaagattgtgctacattggaccaaagctaacccaacctcacaaagttgtaagaaactgtgcttgtaccaaagaagattatgaatgtgactttaactactacagagatgaaagtggcatttgtagattggtgccaggattctctccgccagatcattcagaaatatgcaactccgaaagccgtcctgttgaatactgggtacccactggttacagaaaaatccctatgtccacatgcgagggaggagtcgaactggacaaggttgaaccaaaaccatgtcccggacgggaagaatcgttcagggagaaatacggtggtttgcgtggtttaggtttagttgtggcagcactcgctggtcttggtgttgttggtttcattggtcttgttctctacaagtactatgattccaagtttggtcagatcaagttgggagaagaaggtaactttgaagttttcgaaagaggtggattcctatccgaggtaaatgccattgttggatctattcttgttaccggagttgcttccgtttcccaattgctcagaggaacgtttttgaagttaggggaaattaagaataaagttttaggaaatcctagagggaatcagaatttgccctccgcatacgttgttgctgatgaccatgaagatctattgaacgacagcttccatgacgatgaccagaatgaggaaatctccagagatcaattcagcgatgacgatatcatcaacagcgaagacgagcgtcaattataaaccagatcttttaactcgttgtatatatttattagacatggcatgagcgtaagtacatagattcaatttattctaggttttttggttcggtgctcttcttcctcttcctcttcttcctcctcatccttttcatcaacttcttcatcgctgacatctaattcctcgctagatgaatcaccttcaatttgaccagttaagcaggcttgagtatagtatttagtagagtaggggaaaatgtcttctaccagagctcgtgtcagttcttctccagatctgaattcttttccagctttcttacctgtccatgaaaaccatgcaaaaaaagttttcatcccctttctgtagtttttctttccctccgccgatttcttatcagtgatcttataggggtttatagaatcatactccttaggccattgaatcgtagcaggttcagatacaagcttttcttgatttgtttcttcgtctatttctgacttaaaatgtttggtcacaacctgggcagtgattttattgtctgaatcatcaaatgcaatagttatagaaaaatcacgagaattttccaaatcccagtcaacatagatatccgtgatattctcaagaaatcttaagtcgtctgtttgaatatattcagaaaagtcgtcatgctctgacaaaacaataaaccagtattttggaatctgcttagtaagttcttgacgtttcaagtaaacatctttggttttcgtagctttgaactgttcaacttctcgttccactttctccatggagttctcgcaggcggccaaatcggagaaaatttgctctaatttacgactattggttagtatatccaaactgaacgcaaaatctgtttgtggttcttactcctctgacattggggttctcttaggtggtacgtatcaatcgcttctagaagccatacactttgggatctcaaaatttattattggaatgtttcgagcatacttatttgtacaaaggctttctaaaaaatccgaagaggttcaggtctagtttcttctctttcttcttgtgatttcgggaagcttaaaaggtactctcagcacagcaaccttgtgagtcttcatttcagatctttttactcccaggacctcagcttcagcagccgtgactggcttgatggtgcaacccaagactctcaacaggttggagagtttcgatgattttaaggacagctcttgcgatagcgggggtatttcgatcataaatgaatcgatgtgcaaaatgagggccaaaatgtatcccagcaatttgtcct

SEQ ID NO: 16 - DNA, 536 bp, Artificial Sequence
  codon-optimized gcsf
acaccattaggacctgcttcctccttgccccaatcattccttctgaagtgtttggaacaagtgcgaaagatacaaggtgatggagctgcccttcaagaaaaactatgtgcaacctacaagctgtgtcatcctgaggaattggtactgctgggacattcattaggtattccatgggccccattgtcttcttgtccaagtcaagctttacaactagccggttgtttgtcacagttacattctggtttgttcctataccaaggattactgcaagcactggaaggaatttcacctgaattgggtcctacattagatactttacaattggatgttgctgatttcgctactactatttggcaacaaatggaagagctaggtatggctccagcacttcaacctacgcaaggagcaatgccagcttttgcctctgcctttcagcgtcgagctggcggggtgttagttgcatctcacttacagtctttcctggaagttagttaccgtgtcctaagacatttggctcaaccataataaggccggcc

SEQ ID NO: 17 - DNA, 1845 bp, Pichia pastoris
atgagcaccctgacattgctggctgtgctgttgtcgcttcaaaattcagctcttgctgctcaagctgaaactgcatccctatatcaccaatgtggtggtgcaaactgggagggagcaacccagtgtatttctggtgcctactgtcaatcgcagaacccatactactatcaatgtgttgctacttcttggggttactacactaacacctcaatctcttcgacggccacccttccttcttcttctactactgtctctccaaccagcagtgtggtgcccactggcttggtgtccccattgtatgggcaatgtgggggacagaattggaatggagccacatcttgtgctcagggaagctactgcaagtatatgaacaattattacttccaatgtgttcctgaagctgatggaaaccctgcagaaattagcactttttccgagaatggagagattatcgttactgcaatcgaagctcctacatgggctcaatgtggtggtcatggctactacggcccaactaaatgtcaagtgggaacatcatgccgtgaattaaacgcttggtattatcagtgtatcccagacgatcacaccgatgcctctactaccactttggatcctacttccagttttgtgagtacgacatcattatcgactcttccagcttcttcagaaacgacaattgtaactcctacctcaattgctgctgagcaagtacctctttggggacaatgtggaggaattggttacactggctctacgatttgtgagcagggatcgtgtgtttacttgaacgattggtactatcagtgtctaataagtgatcaaggtacagcatcaactgccagtgcaacgactagtataacttccttcaatgtttcatcgtcgtcagaaacgacggtaatagcccctacctcaatttctactgaggatgtcccactttggggccaatgtggaggaattggatataccggttcgaccacttgtagccagggatcatgcatttacttaaatgactggtattttcaatgtttaccagaggaggaaacgacttcatcaacttcgtcatcttcctcatcttcctcatcttccacatcttccgcatcttccacatcttccacatcatccacatcctccacatcctccacatcttcctcaacaagtagctcatccattccgacttctacaagctcatcgggagactttgagacaatccccaacggtttctcgggaactggaagaaccacgagatattgggattgttgtaagccaagctgctcatggcctgggaaatccaacagcgtaacaggaccagtgagatcttgtggtgtctctggcaacgtcctggacgccaacgcccaaagtggatgtattggtggtgaagctttcacttgtgatgagcaacaaccttggtccatcaacgacgacctagcctatggttttgccgcagcaagcctagctggtggatctgaggattcctcttgctgcacctgtatgaagctgacattcacctcatcttccattgctggaaagacaatgatcgttcaactgaccaatactggagctgatcttggatcgaatcactttgacattgctcttcctggtggagggcttggaatcttcaccgaaggatgctctagtcaatttggaagcggttaccaatggggtaaccagtatggtggtatctcttcgcttgctgagtgtgatggcctaccatcagaactgcagccaggctgtcagtttagatttggctggtttgagaacgctgataacccttcagtggagtttgaacaggtttcatgtcctccggaaatcacttctatcaccggctgtgctcgtacggacgaataa

SEQ ID NO: 18 - DNA, 2397 bp, Artificial Sequence
  clpl-met-gcsf gene fusion
atgagcaccctgacattgctggctgtgctgttgtcgcttcaaaattcagctcttgctgctcaagctgaaactgcatccctatatcaccaatgtggtggtgcaaactgggagggagcaacccagtgtatttctggtgcctactgtcaatcgcagaacccatactactatcaatgtgttgctacttcttggggttactacactaacacctcaatctcttcgacggccacccttccttcttcttctactactgtctctccaaccagcagtgtggtgcccactggcttggtgtccccattgtatgggcaatgtgggggacagaattggaatggagccacatcttgtgctcagggaagctactgcaagtatatgaacaattattacttccaatgtgttcctgaagctgatggaaaccctgcagaaattagcactttttccgagaatggagagattatcgttactgcaatcgaagctcctacatgggctcaatgtggtggtcatggctactacggcccaactaaatgtcaagtgggaacatcatgccgtgaattaaacgcttggtattatcagtgtatcccagacgatcacaccgatgcctctactaccactttggatcctacttccagttttgtgagtacgacatcattatcgactcttccagcttcttcagaaacgacaattgtaactcctacctcaattgctgctgagcaagtacctctttggggacaatgtggaggaattggttacactggctctacgatttgtgagcagggatcgtgtgtttacttgaacgattggtactatcagtgtctaataagtgatcaaggtacagcatcaactgccagtgcaacgactagtataacttccttcaatgtttcatcgtcgtcagaaacgacggtaatagcccctacctcaatttctactgaggatgtcccactttggggccaatgtggaggaattggatataccggttcgaccacttgtagccagggatcatgcatttacttaaatgactggtattttcaatgtttaccagaggaggaaacgacttcatcaacttcgtcatcttcctcatcttcctcatcttccacatcttccgcatcttccacatcttccacatcatccacatcctccacatcctccacatcttcctcaacaagtagctcatccattccgacttctacaagctcatcgggagactttgagacaatccccaacggtttctcgggaactggaagaaccacgagatattgggattgttgtaagccaagctgctcatggcctgggaaatccaacagcgtaacaggaccagtgagatcttgtggtgtctctggcaacgtcctggacgccaacgcccaaagtggatgtattggtggtgaagctttcacttgtgatgagcaacaaccttggtccatcaacgacgacctagcctatggttttgccgcagcaagcctagctggtggatctgaggattcctcttgctgcacctgtatgaagctgacattcacctcatcttccattgctggaaagacaatgatcgttcaactgaccaatactggagctgatcttggatcgaatcactttgacattgctcttcctggtggagggcttggaatcttcaccgaaggatgctctagtcaatttggaagcggttaccaatggggtaaccagtatggtggtatctcttcgcttgctgagtgtgatggcctaccatcagaactgcagccaggctgtcagtttagatttggctggtttgagaacgctgataacccttcagtggagtttgaacaggtttcatgtcctccggaaatcacttctatcaccggctgtgctcgtacggacgaaggtggaggttctttggttaagaggatgacaccattaggacctgcttcctccttgccccaatcattccttctgaagtgtttggaacaagtgcgaaagatacaaggtgatggagctgcccttcaagaaaaactatgtgcaacctacaagctgtgtcatcctgaggaattggtactgctgggacattcattaggtattccatgggccccattgtcttcttgtccaagtcaagctttacaactagccggttgtttgtcacagttacattctggtttgttcctataccaaggattactgcaagcactggaaggaatttcacctgaattgggtcctacattagatactttacaattggatgttgctgatttcgctactactatttggcaacaaatggaagagctaggtatggctccagcacttcaacctacgcaaggagcaatgccagcttttgcctctgcctttcagcgtcgagctggcggggtgttagttgcatctcacttacagtctttcctggaagttagttaccgtgtcctaagacatttggctcaaccataataa

SEQ ID NO: 19 - DNA, 1478 bp, Artificial Sequence
  codon-optimized TNFRII-Fc ORF from pGLY3465
gaattcgaaacgatgaagtgggttacctttatctctttgttgtttcttttctcttctgcttactctctgccagctcaagttgcttttactccatacgctccagaaccaggttctacttgtagattgagagagtactacgaccaaactgctcagatgtgttgttccaagtgttctccaggtcaacacgctaaggttttctgtactaagacttccgacactgtttgtgactcttgtgaggactccacttacactcaattgtggaactgggttccagaatgtttgtcctgtggttccagatgttcttccgaccaagttgagactcaggcttgtactagagagcagaacagaatctgtacttgtagacctggttggtactgtgctttgtccaagcaagagggttgtagattgtgtgctccattgagaaagtgtagaccaggtttcggtgttgctagaccaggtacagaaacttccgacgttgtttgtaagccatgtgctccaggaactttctccaacactacttcctccactgacatctgtagaccacaccaaatctgtaacgttgttgctatcccaggtaacgcttctatggacgctgtttgtacttctacttccccaactagatccatggctccaggtgctgttcatttgccacagccagtttccactagatcccaacacactcaaccaactccagaaccatctactgctccatccacttcctttttgttgccaatgggaccatctccacctgctgaaggttctactggtgacgagccaaagtcctgtgacaagacacatacttgtccaccatgtccagctccagaattgttgggtggtccatccgttttcttgttcccaccaaagccaaaggacactttgatgatctccagaactccagaggttacatgtgttgttgttgacgtttctcacgaggacccagaggttaagttcaactggtacgttgacggtgttgaagttcacaacgctaagactaagccaagagaagagcagtacaactccacttacagagttgtttccgttttgactgttttgcaccaggattggttgaacggtaaagaatacaagtgtaaggtttccaacaaggctttgccagctccaatcgaaaagacaatctccaaggctaagggtcaaccaagagagccacaggtttacactttgccaccatccagagaagagatgactaagaaccaggtttccttgacttgtttggttaaaggattctacccatccgacattgctgttgaatgggaatctaacggtcaaccagagaacaactacaagactactccaccagttttggattctgacggttccttcttcttgtactccaagttgactgttgacaagtccagatggcaacagggtaacgttttctcctgttccgttatgcatgaggctttgcacaaccactacactcaaaagtccttgtctttgtccccaggtaagtagggccggcc

SEQ ID NO: 20 - protein, 1542 aa, Pichia pastoris
MWIERNLIASILLFSTSAYAAFKPRIVKKEFDDLLNPIYFNDSSTVLGLVDQTLLISNDDGKSWTNLQEVITPGEIDPLTIVNIEFNPSASKAFVFTASKHYLTLDKGSTWKEFQIPLEKYGNRIAYDVEFNFVNEEHAIIRTRSCKRRFDCKDEYFYSLDDLQSVDKITISDEIVNCQFSQSSTSSDSRKNDAITCVTRKLDSNRHFLESNVLTTLNFFKDVTSLPASDPLTKMLIKDIRVVQNYIVLFVSSDRYNKYSPTLLFISKDGNTFKEASLPDSEGTSPSVHFLKSPNPNLIRAIRLGKKNSLDGGGFYSEVLQSDSTGLHFHVLLDHLEANLLSYYQIENLANLEGIWIANQIDTSSKFGSKSVITFDAGLTWSPVTVDEDEDKSLHIIAFAGENSLYESKFPVSTPGIALRIGLIGDSSDALDIGSYRTFLTRDAGLTWSQVFDNVSVCGFGNYGNIILCCSYDPLLRSEPLKFRYSLDQGLNWESIDLGFNGVAVGVLNNIDNSSPQFLVMTIATDGKSSKAQHFLYSVDFSDAYEKKICDVTKDELFEEWTGRIDPVTKLPICVNGHKEKFRRRKADAECFSGELFQDLTPIEEPCDCDPDIDYECSLGFEFDAESNRCEPNLSILSSHYCVGKNLKRKVKVDRKSKVAGTKCKKDVKLKDNSFTLDCSKTSEPDLSEQRIVSTTISFEGSPVQYIYLKQGTNTTLLDETVILRTSLRTVYVSHNGGTTFDRVSIEDDVSFIDIYTNHYFPDNVYLITDTDELYVSDNRAISFQKVDMPSRAGLELGVRALTFHKSDPNKFIWFGEKDCNSIFDRSCQTQAYITEDNGLSFKPLLENVRSCYFVGTTFDSKLYDFDPNLIFCEQRVPNQRFLKLVASKDYFYDDKEELYPKIIGIATTMSFVIVATINEDNRSLKAFITADGSTFAEQLFPADLDFGREVAYTVIDNWESKTPNFFFHLTTSEDKDLEFGALLKSNYNGTTYTLAANNVNRNDRGYVDYEIVLNLNGIALINTVINSKELESEQSLETAKKLKTQITYNDGSEWVYLKPPTIDSEKNKFSCVKDKLSLEKCSLNLKGATDRPDSRDSISSGSAVGLLFGVGNVGEYLNQDSSGLALYFSKDAGISWKEIAKGDYMWEFGDQGTILVIVEFKKKVDTLKYSLDEGETWFDYKFANEKTYVLDLATVPSDTSRKFIILANRGEEGDHETVVHTIDFSKVHQRQCLLNLQDSNAGDDFEYWSPKNPSAVDGCMLGHEESYLKRIASHSDCFIGNAPLSEKYKVIKNCACTRRDYECDYNFALANDGTCKLVEGESPLDYSEVCRRDPTSIEYFLPTGYRKVGLSTCEGGLELDNWNPVPCPGKTREFNRKYGTGATGYKIVVIVAVPLLVLLSATWFLYEKGIKRNGGFARFGVIRLGEDDDDDLQMIEENNTDKVVNVVVKGLIHAFRAVFVSYLFFRKRAAKMFGGSSFSHRHILPQDEDAQAFLASDLESESGELFRYASDDDDAREIDSVIEGGIDVEDDDEENINFDSR

SEQ ID NO: 21 - protein, 1502 aa, Pichia pastoris
MRTLTLLVYFVVAALAFTPQTNSRIFKGYPKKVVYFDDTASVVYHDGSDNEIYYSKDDGVTWTQLDLGGASAHQVIVHPFDPSTAYILTTSETHFVTTDSGFTWNKVSSPEPPVTNEFPTLSQESSSLTLNSKNFEYVLFAGQCTDGSEICNRKYYYSLDNMRTFNELIEAHSCLFVDTADAIAGDHSPNAVICAITNPDGKLSLVKTANFFKDGIDYVSSGGGLIENPELLGASHNYILAVGSHLLHNKDKFVYISFDGSNFNKVKLNGNTNDLKILDSLPSSVAISAGNALFISSSGSNSLNDDNDNNYFTSKLSSLHVKDNFADYELIDAVEGVILANTNENGNVRSFISTNNGDSWKPLELKSGSPLHLHSVIQRSLSDNRADPGKYYSTPVPGLLLGVGNEGPSLNPYSKGNTYVSTDAGASWTKTLTGPHIFEVGDSGSLIIAIPQSGPTDIIKFSKDFGSSWTTARLGQYITADFITTTPDATSLSFLVVGTNNDDKYIAQALNFRGVYDTVCSESEFEDWYPIDSKGKKICIMGHKQKFSRRKPSAACSVSKLYLEAVSVQEDCPCTEQDFECAQGFSRNSQGKCLADNIEAELALQRKLCVNGATSYEVPSGYQLILGNTCQGSSDLQTPLQKRCPDEPKTVPEAENLDPSYSSSDEKDDNPDEEEGAPEDSKEGFNDGKVKASVFTFDGKVEEYIYLERDKENPSEDETLVAITNRNEAYVSHNQGYSWEQIAPGEDILSIYLSRFDRNHVYLVAANQKIIYSRDRADNWKSFRTPSMPIPGVRPIYFHPYLPHYLIYVGQEGCDSQYSKSCRSVAYFSKSYGKRWTPIQENVNSCQFVGGLQKRNHDNLIICDRPATDSNDFKSQIFWSKDLFKTKTIALENTIGFVQVADYLVAATIEHNDELRAHVSIDGTTWADAYFPPNFRVDKQQAYTTLSGATKSIFLHVTTNPRPNTEFGTILKSNSNGTSYVLSLDNVNRDSKGYVDFEQMSGLEGVIIVNTVDNASAAKKGSRKQLKSKITYNDGAHWSYITPPAIDSDGNKFPCKGKSLEKCSLNLHGYTEREDYRDTFSSQSAIGMMLGVGNVGEHLENYYDGHTFLTKDGGITWKEVKKGVYQWEYGDQGSVIVLVNGKDNTNILYYSVDEGDTFEEFQFTDELVTVQDISTVPNDNSRKFLLFTRVPLAKGDKTRVFQIDFSHLLNRKCSLDLRNEDTDDFELWSPSHPFQPDNCMFGHETQYYRKLPGRLCYIGPKLTQPHKVVRNCACTKEDYECDFNYYRDESGICRLVPGFSPPDHSEICNSESRPVEYWVPTGYRKIPMSTCEGGVELDKVEPKPCPGREESFREKYGGLRGLGLVVAALAGLGVVGFIGLVLYKYYDSKFGQIKLGEEGNFEVFERGGFLSEVNAIVGSILVTGVASVSQLLRGTFLKLGEIKNKVLGNPRGNQNLPSAYVVADDHEDLLNDSFHDDDQNEEISRDQFSDDDIINSEDERQL

SEQ ID NO: 22 - protein, 1579 aa, Saccharomyces cerevisiae
MILLHFVYSLWALLLIPLTNAEEFTPKVTKTIAQDSFDILSFDDSNTLIRKQDTSVTISFDDGETWEKVEGIEGEITWIYIDPFNRHDRAVATAMNGSYLYITNDQGKSWERITLPDSGESISPRECYIETHPLNKNYFLAKCNYCEKTEVNNDNEENSGDEEGQFEIFNITRCTDKVFASNDGGKSFSEIKSSLERNENSPISISDCGFAKTSKDSDLESSDTSIICLFQNMQLIMDEFSSPYTESKLVLTTDWGKSLKEFDQFKDKVVNGYRILKSHMVVLTQGDRYNDMSSMDVWVSNDLSNFKMAYMPTQLRHSMQGEIYEDAMGRIILPMSRERSDQEEDKGIVSEILISDSQGLKFSPIPWTANEVFGYINFYQPTYLKGTMIASLYPLSRRRNRKGKAKGVKSKGVTKISVDNGLTWTMLKVVDPDNADSFDCDITDFENCSLQNMFYTREGSTPTAGILMTTGIVGDGSVFDWGDQRTFISRDGGLTWKLAFDFPCLYAVGDYGNVIVAIPYNADEDDDPQSEFYYSLDQGKTWTEYQLETTIYPNEVMNTTPDGSGAKFILNGFTLAHMDGTTNFIYAIDFSTAFNDKTCEENDFEDWNLAEGKCVNGVKYKIRRRKQDAQCLVKKVFEDLQLFETACDKCTEADYECAFEFVRDATGKCVPDYNLIVLSDVCDKTKKKTVPVKPLQLVKGDKCKKPMTVKSVDISCEGVPKKGTNDKEIVVTENKFDFKIQFYQYFDTVTDESLLMINSRGEAYISHDGGQTIKRFDSNGETIIEVVFNPYYNSSAYLFGSKGSIFSTHDRGYSFMTAKLPEARQLGMPLDFNAKAQDTFIYYGGKNCESILSPECHAVAYLTNDGGETFTEMLDNAIHCEFAGSLFKYPSNEDMVMCQVKEKSSQTRSLVSSTDFFQDDKNTVFENIIGYLSTGGYIIVAVPHENNELRAYVTIDGTEFAEAKFPYDEDVGKQEAFTILESEKGSIFLHLATNLVPGRDFGNLLKSNSNGTSFVTLEHAVNRNTFGYVDFEKIQGLEGIILTNIVSNSDKVAENKEDKQLKTKITFNEGSDWNFLKPPKRDSEGKKFSCSSKSLDECSLHLHGYTERKDIRDTYSSGSALGMMFGVGNVGPNLLPYKECSTFFTTDGGETWAEVKKTPHQWEYGDHGGILVLVPENSETDSISYSTDFGKTWKDYKFCADKVLVKDITTVPRDSALRFLLFGEAADIGGSSFRTYTIDFRNIFERQCDFDITGKESADYKYSPLGSKSNCLFGHQTEFLRKTDENCFIGNIPLSEFSRNIKNCSCTRQDFECDYNFYKANDGTCKLVKGLSPANAADVCKKEPDLIEYFESSGYRKIPLSTCEGGLKLDAPSSPHACPGKEKEFKEKYSVSAGPFAFIFISILLIIFFAAWFVYDRGIRRNGGFARFGEIRLGDDGLIENNNTDRVVNNIVKSGFYVFSNIGSLLQHTKTNIAHAISKIRGRFGNRTGPSYSSLIHDQFLDEADDLLAGHDEDANDLSSFMDQGSNFEIEEDDVPTLEEEHTSYTDQPTTTDVPDTLPEGNEENIDRPDSTAPSNENQ

SEQ ID NO: 23 - protein, 1549 aa, Saccharomyces cerevisiae [sequence omitted]

SEQ ID NO: 24 - protein, 1549 aa, Saccharomyces cerevisiae
MALFRALYIIWVFLLIPLSNAEEFTPKVTRTLSRYVFDIVNFDDSNTLIRAEEDSVEISFDAGENWKTIDEIEEPIESFVVDPFRGHDRAFAFVKTAPKFYVTDDQGKSWRPLTIPISEKASNYFCDVTTHPIKKKHLIIRCDLLTIKNSGLMYVGREIYTTNDGVSFSQVKPSFGKIDGHISTARCDFIKSSEDSDLGGNDASILCLFRNTEYIESTGSTIDKSELILSADGGETFKELVQFKDKVVSRYEILKHHVIVLTQDDMYNEMSSTNIWISNDVSTFQVARTPTKIRHVNMGQIHEDSIGRIVLPVSRERDDEDSNQPGAAEVLISDSEGLKFLPINWIPNNQFGYINVAYPGFLKGTFFGSFHPFIEYSDRKRKYSRQKVREETKVSVDNGLTWTNLKVVDRENVDLFGCDVTKPERCSLQTHFYDLRNLNPSAGIMMISGIVGDGSAYNWKEEKTFISRDSGLTWRLVHNSTGLYTTGDLGNIIMYIPYRSNENGDVPSKFYYSLDQGKTWGEYDLIMPIYPYRLVSTISDGSGSKFILTGTSITEDPIFITYSIDFSAVFDYKSCEEGDFEDWNLADGKCVNGAKYKYRRRKQDAQCLVKKAFKDLSLDETPCNSCTGSDYECSFEFVRDAKGDCIPDYNLIALSDICDKSKGKSVLVKPLQLIKGDKCKTPMKIESVDIPCDEIPKEGSSDKEIVTTENKFDFEIKFYQYFDTVADESLVMLNSIGDAYISHDGGQTIKRFDTDGEKIVEIVFNPYFNSSAYLFGSKGNIFLTHDRGYSFMIAKLPEARQLGMPLDFSAKAQDTFIYYGGKNCESILSPECHAVAYLTKDGGETFTEMLDNAIHCEFAGTLFKYPSNDDMVMCQVKEKFSQTRSLVSSTDFFQDDRKTVFENIIGYLSTGGYIIVAVPHEDNELRAYVTNDGAEFTEAKFPYDEDIGKQDAFTILGSEEGSIFLHLATNLESGHDFGNLLKSNSNGTSFVTLEHAVNRNTFGYVDFEKVQGLEGIIITNIVSNSEKVGENKEDEQLKTKITFNDGSDWNFLKPPKKDSEGKKFPCDSVSLDKCSLHLHGYTERKDIRDTYSSGSALGMMFGVGNVGDRLLPYEECSTFLTTDGGETWTEVKKGPHQWEYGDHGGVLVLVPENAETDSISYSTDFGKTWKDYKFCGDKVLVKDIITVPRDSALRFLLFGEAKNMGSGSFRTYTIDFRNIFERQCEFDITGRKRADFKYSPLGSRTGCLFGHKTEFLRKTDEKCFIGNIPLSEFSRNVKNCPCTRQDFECDYNFYKASDGTCKLVKGLSSANGADICKKEPDLIEYYDSSGYRKIPLSTCKGGLKLDAHLAPHPCPGKEKAFREKYSINTGAYALVFVTILLVIFFVAWFVYDRGIRRNGGFSRFEEIRLGDDGLIENNRTDRVVNIIVRLGLCISLITKSAFQRAKAGTAQLSSKFRARFGNKKGATYSSLLHDQLSDEPDGFHEDSNDLSSFRGQGSNSEIEQEDVDTSQQEHTSRTDLLGASNIPDALPARSASHESDLAAARSEDK

SEQ ID NO: 25 - protein, 1116 aa, Saccharomyces cerevisiae
MLMTGSVGDGSEFDWEDQKTFISRDGGLTWRFVHNSSGLYATGDLGNIIVYIPYDPEEDGDFQSEFYYSLDQGRTWNEYELTNAISSVHPYKLINPTPDGSGSKFIFKGTFATTDSETNSITSLKGVEYIIDFSAAFDSRTCEEEDFEDWDLADGKCVNGAKYKYRRRKQDAQCLVKKAFKDLSLDETPCNSCGESDYECSFEFVRDANGLCIPDYNLIAFSNICDKSKDKSVLVEPLQLIKGDECKTPMKIEPVDIPCDEIPEEGSSDREIVTTENKFDFEIKFYQYFDTVADESLVMLNSIGDAYISHDGGQTIKRFDTNGEKIVEVVFNPYFNSSAYLFGSKGNIFSTHDRGHSFMIAKLPEARQLGMPLDFSAKAQDTFIYYGGKNCESILSPECHAVAYLTKDGGETFTEMLDNAIHCEFAGTLFEYPSNEEMVMCQVKKKSSETRSLVSSIDFFQGDNKIIFENIIGYLSTGGYIIVAVPHEDNELRAYVTIDGTEFAEAKFPYGQDVSKQEAFTILGSEKGSIFLHLATNLESGHDFGNLLKSNSNGTSFVTLEHAVNRNTFGYVDFEKVQGLEGIIITNIVSNREKVGENKEDEQLKTKITFNDGSDWNFLKPPKKDSEGKKFPCDSVSLDKCSLHLHGYTERKDIRDTYSSGSALGMMFGVGNVGDKLLPYEECSTFLTTDGGETWTEVKKGPHQWEYGDHGGVLVLVPENAETDSISYSTDFGKTWKDYKFCGDKVLVKDIITVPRDSALRFLLFGEAKNMGSGSFRTYTIDFRNIFERQCEFDITGKKRADFKYSPLGSRTGCLFGHQTEFLRKTDEKCFIGNIPLSEFSRNVKNCSCTRQDFECDYNFYKASDGTCKLVKGLSSANGADICKKEPDLIEYYDSSGYRKIPLSTCKGGLKLDAHLAPHPCPGKEKAFREKYSINTGAYALVFVTILLVIFFAAWFVYDRGIRRNGGFSRFEEIRLGDDGLIENNRTDRVVNIIVRLGLCISLITKSAFQRTKAGVARFSSKLRARFGNRKGPTYSSLLQGQFSDESDGLHEDANDLSSFTSQDSNFEIEQEDAYRPEQEHTSQIDQPATSNIPDALPARSAIHKPDSTAVRNEDE

SEQ ID NO: 26 - protein, 1472 aa, Aspergillus niger
MIFRWLLLVSCLLVALIPQQSSAKKSDQPKVTATKLEHEPFSLFYFEDSETVLMSLKNGEFKQSFDGGEEWEDVASSEDGRVTQPVVFIRQHPFDKNKAYALGVDGHHLVTTDQAKTWRSFDIGDQPALQHPPLVFHGWDSSKVIYQSEECAGFFCITVRLLRESAAGCSWAVGHPHFAEDMDLNQELKDRSLCVVPGLKVPFGHANRLVYSDDYFVSNIEGTEVNLHEGRPVSGVISTAAVKKFIVAAVKSKGTEELALFVTTDTNTWHRAEFDGHRIEQDAYTMLESTNYSLQVDVLTSPSSNMGVLFTSNSNGTFFSRNIEHTNRDMEGTVDFEKIAGIQGIVMVNTVKNPKEVKSGQAKKVISRISFDDGRSFQPLKVGDKNLHLHSVTTFANIGRVFSSPAPGLVMGIGNTGDHLQKYSDGDLYISDDAGVTWRHALDGPHKYEFGDQGAVVMAISDKGKSNKISFSLDHGKEWGSVEIEHKIYPTMVTTTPDSTSLRFLLVGKQNEESGFIVYSIDFKGLHERKCEEDDFEKWPARLDENGEPDCLMGHKQFFRRRKANADCFVDEEFKDPQPIMEPCKCTAEDFECEFKGSEDGKSCIPALLPVPPEGCKNPDDTFMGPSGWRLIPGDTCIRDGGKNLDHDVEWRCKDAGNVPTSGEISVEKQYFDARQFSAYYYLERQSSSSGNDETIVMLTSERALYVSHDHGKTWKQPLKGEAINRIVPHPYNSDGAFLLTDGAEGFWTVDRGQSFKPFDAPAPPTEERLPTLTFHPQYQDWLIWTGAVDCGSGDCHSNAYISKNRGDNWELLQRYVQKCEFESREGRKDSTNLIFCEQFENENRNNRLQLVSSKNWFSDSTVHFRDVINYATMSEFIVVASRDTEKPDSLVASSSVDGETFAEAKFPPNVNVPVQTAYTVLESSTHAVFLHVTVSNSEGAEYGSIIKSNSNGTSYVLSLGAVNRNFRGYVDFEKMQGIEGVAVANVVSNVNKLSDGEPKKLRTMITHNDGGQWTLLSPPNKDAEGKDFGCSVEGEGVPGCSLHLHGYTERRDERDTFSSSSAIGLMLGVGNVGDHLGGEDEADTFITRDAGFTWKSVKKGRYIWEFGDAGSLIVIVPESKPTKTLYYSLDEGDTWLDFVFSDVEMQIDDISTVPSDTSKSFLLWGKELKSDYQDKLATVSVDFSGLRSSSCKLDENSAESHDYYLWEPKHPFQSDNCLFGHVEQYHRKKPSAQCWNDWREPHVHSIGENCPCTRADFECDYNYEPQSDGSCALVQGLAPPDAMAVCREDPEAYQYWEPSGYRRLPQSTCQGGREMDHIVSKPCPNREEEYKKKHGISGAGLFFAIVIPIAVASAVGYYGYTRWDGKFGQIRLGENVGTSQGLLSRDSLLITIPVTIIAGAVAVIKALPLLATSLWRSASGYVRLGRNRGYSRPYASRGSFAARRGDYTGVVDDEDELLGVEDLEADEEEEL

SEQ ID NO: 27 - protein, 1466 aa, Saccharomyces pombe
MFFLTKILPLRGRIFPMFGCLLLIVSLITGCIASPAAEVAETVFDSKPVDFMTFKDSTNTLFLNAEFGDVYLSQDNGQSWRNGVISGQVCPIKKLIKHSFENSRVFALTECDTVYYSYDNGENWDYFTIDHPISITQLPFHFHAKNPDYVIFNNQYCSSSGTWVGKICKPDLYYTKDGFQSDPEPMPVGSSYCIFADSSEKMVVSSEEQIICISLNPNSAARPPFSHHIVYSDDWFQSIVPVQLHNFLGSDGAYGILSTGSFLVAALIDAATRKLFVYVSQDGYYWEEALKFHKGFEFDAFTILPSTEYSFFIDSLDSHPNNPTGILYSLDSESNTFVIRQMNTNRYVDGYTDFMLIDYLDGLQFVNVVENVDEIEVDPQVDKVLSSRITFDGGKTWSTVASPESSCNSMKQCSLHLFLDPHVSHASIASSKFAPGILLASGSVGDRLLSENQMDLFVSEDGGRNWTLSRDGMHLFAMSGFGSIFFASEYLDVINEVYYSLDHGQSWVTVTLDKTIVPIKLFASEDPYAEIFYLLAMTDDGEQSNYSLFSFNFGKFLPKECQFSNSESNKNDFEKWYTRYANGSPICSEMGKKEFFWRKKATSVCSVPKSITDLHGSFDACECTDEDYECNTQFISNDQGECKLLDFIGSLLCASEDLDTFQKIPYRLVPGNKCTPNKRDSHREPQTFNCDSFNEPGTEITSFLYDFDEKIVDVVYLEGTVPEENTFLIGISVNSHVYFSEDEGKTWDKFSKEEFSSVLPHAYNKNSVYMVTSKNIVYFTTNRGKNFYKFKAPSPPNQNGKSLFSFHPSRPAWLLYAGSENCEKNPFADDCRDVVFVSLDFGDTWSRLPSNLEYCSWAKAEKLVVDDTLIFCIRQNTNDPFKKELISSIDFFEYEQDEILNDVVGFMIEDEYVIVAVQDEEGTSLSLDVSINGLNFASCSFPAYLNVHPKQAYTILDSQTHSLFIHVTTNTHLGSEWGDILKSNSNGTYFMTSLANVNRDSVGYVDFERLEGIQGIALANIVSNTKELTDGGTKKLQTLITFNDGLDWSYLNLVGGEKIVPKCGKNCYLHLHGYTERNQFSDPTSTNAAVGLIIGVGSFSPFLIPYEESQTFISRDAGVTWYRIFDSPHLWAFLDSGSIIIAVESISPTNVIKYSADEGRTWQEYQFSEKSKVVVDVSTKPSGVGHQVLLLTTDDENAPISSVLIDFDALYRRTCVFDEENSEESDFVRWVPTDISGKPLCLRGRISSFYRKSIHKKCRVGSSLLVKEEVLSKCECTRADFECDYNYRRLKDGTCVLVSGLQPPDTREEQCSVDDAFEWRQPTGYKRTPLTECEGGVPLDAGTLHPCPGKEDDYYKAHPKPGGWSIFLTIIFSILLAAVAGCILYYYSRRFLKGAIRLGSDSATENPLESGISYTRGAFSSIPIFFSALYQSVRSLFIRSTPTNGEFENAAFLQNYEIDDDDEESV

SEQ ID NO: 28 - protein, 1339 aa, Candida albicans
MIVVSRMDKFNEKSLINAYVSRDGENFVRADLDIDIKYGVMSFLPSSVSSLFLTIMDFNSRAFQTASFYGSDSSGLHFTKLLDNVAGGNIQKIENIDGAWIANIGVDSNNPYDGDKSLLDNLFGGTYAKSIVSKVSINDGKDWSLIKLNDNSCKIEDECSLHLWDFTELDGEGKFVTGPTPGILLGVGNKGKNLAHEFEKMKTYVSRDGGVTWNKALDFPAVFAFGDQGNVILAVPYNGKKKYEAAKHFYFSLDQGKSWEKVDLEHPIYPLSILTTIDGTSRKFIIGGIDDSRRAENEYIYSVDFTNAFDGKTCGDDDFEEFVARKSNDNGNDEPLCVYGHREKFRRRKQDAKCFVNKLFEDIKVIEDPCQCTEHDFECGPGFRISEKESTNVCVPDRKQLTQLCQSKSEITLPNKVLVEGNKCNMGDKKLEDFVSQETLKCSDYVDNGGDGNGDEQNPNQGDSNQIEVHINDFEGKLSQYQYIAESKDNNAADNVVIKTMDDRLWISNNGGVSFVRVPISDKILGFYAGPIPGQITLITATNIIYVSDDGGATFIKRKVPTQPSPRVDRAIAFHSKNVERFIWFGEECESNGRCTSNAYITDDAGATFNKLMANVRTCDYVGAVLESGDHELIYCSGQNSLDNNNNNKNKNKLALFSLKESSSEEPKKIFENIVGYAITGTYVVVATIDDKTDSLLSKVTVDGDIFADADFPHDLKVEPHQAFTVLDSSSKAVFMHVTTNEKPNFEYGQLLKSNSNGTYFVLTLDNVNRNTVGYVDFDKIDGLEGTIIANVVANAQANEGTKNLQTLISHNDGSEWDKLVPPTIDSEGIKYPCTGQSLNKCALHLHGFTERADYRDTFSSGSATGFLIGVGNVGEFLTPMDDPSTATFLSTDGGVTWKEIKKGVYMWEYGDQGTILVLVNAVENTDVLYYSLDEGQTWKEYKFSDYKVNIYDLATVPTDTARKFIIFAENPKDHRDIQTFTIDFTNIYPRQCQLNLDDPEHDDYEYWSPTHPIGGDKCIFGHESKYLRRAKGHTDCFIGSAPLSEGYKLEKNCSCTRRDYECDYNYVRDVNDNTCKLVKGMTSADRKTTMCSKENAFQYFESTGYRKIPLSTCKGGQQFDNWNPKPCPGKEKQFNEYYGREVKGHKLFFLIFIPLIIFLATVLFVYDRGIRRNGGFKRLGQIRLNDDDDDFNPIENDQIDVVVNKIVKGGVYTVAVLIATVKTIRKIDRMMLEKLGNVIFRRSPGRRNYVSVPNDLDEEEELFGDYQDNLDDELEDAVFNQDDNLVRTPFADDVEEEEEEREGEGEGEQSNPSDERLFDIDDNEDEDEQHEVNKPTTS

SEQ ID NO: 29 - protein, 1514 aa, Candida glabrata
MRLPSIFLVFFYLFARTLCWSPEVSLLHGVDSLASIIPFDDSSTILSVGRKGVNVSHDYGRTWETKLRNKGEYPVSVTLNTFRPNSRAFVFLNGKLYGTHNEGSDWFESKFPSDRQLTKALTIDFSPFAKDVIIASFVAKDNQNDEKEFNYVSTDDGKSFRVLDVGQEYESMRCRFLSISHESNFPHNDNIICMTKTSSPDQNKLLLSENRGKSFKELSIGEDIAFDNFYLTNSYLVIRSIRDIHNKAAEVDLYVSSDAKDFKKAYLPTTLRRSDIRRIIELLGRKMFITLTRSSESNVQDDNGNTLFTDGLVSNSDGLKFTSFSTSASKSRTTITPVEFLNGTFIQKQVGRNSGGYSISIDNGNTWRKLKYSDKGNKNPIKCQDENDCNLELLIPQIFHGPTAGILVMLGHINDNFSDQQTFISRDGGLNWEMGLEFPGIYATGDLGNVIVACPVDPSSDNDPQSEIYYSLDQGMTWSEYQLDEMFIPIDVINITPDGSGLSFILTGFSLDKPDDQRPNIDNRVTYLIDFNNVHDGKKCKAKDYEKFELAEGSCINGAKYTFNRRKQSAKCIGGEVFKDLLFDMEVCTECQEQDYECSSEFIKDSKGVCVVDEKWLSATGNCPSTDIKKPAMRLIADNMCKKELPIQSKSVSCKNKNPSDPKDIPKKPKEGDRPTFGTGDIQATFNTFKGKVRFYQYFDTDEDESLILATSEGEAYISHDSGQTYTHFNYNKPKVHEIVFNEYFNSSAYIFDIDGNLHVTHDRGYTFDTIRLPASLQLGLPLNFHSKDPNTFIYYGGKNCKSIFDTNCHIVAFITRDGGKSFSELLPNAIHCEFVGSSLKLSDSDDLLFCQVKDETSSKTRQRSLVSTTDYFETEPKVVFQKILGYMTNGEYVIIAVPGENHEITAYVTMDGDEFAETLLPYDLDIEQPEAFTVLGSSTGSVFLHFTSFQENSVAFGSLLKSNTNGTSYVKLQSNVNRNEAGYVDFEKVQGLDGIILTNVVTNADEIKDGSSQKHLRTKITFNDGVDWEYIKPPKKDSSGDSYHCKSNKLEHCSLNLHSYTERKDFRDTFSSGSALGMMIGVGNVGDKLLPFEECSTFLTIDGGKSWTEIKKGAYQWEFGDHGGILILSRDGEMTNSISYSTDFGKSWYDYQFSDEKVLVSDIVTVPQDSALRFLLITADRIGRGFESGTVTVDFSGLFKRQCVLDFNNENHDDFDYFSIGNSENECIFGHKVKYLRKNSEECYVGAVSLSQFTRVMKNCTCTRADFECDYNFVRQYDGTCKLVDGLQPGNEAAICKKDPDLVEYFQSTGYRKIPLSTCQGGLKLDGRTEPLPCPGKEKEFKQKYGISGSSFFLLFFVPFLFFVSAGWFVYDRGIRRNGGFARFGEIRLGDDQLIEENTTDKVVNTIIRFGVASFEVMAGGFGIIRRIANNSFNRITGRMNGRYRPSYSNLMHDDFLDEADDLLAGHDDDANDLASFMDDDSNFDIEDETTSVNDSGYRDQSPETENVVDSNN

SEQ ID NO: 30 - protein, 1564 aa, Pichia stipitis
MIDLHHKPWKVMVVALLALLAMVIGADTQFEPKVTSRHEKSVARSIKFFDDSSNILVLRNEALLISFDDGVNFQDVQESKGDNIMQTEFDPFFPERAFAFTRTSSMYFTVNKGKDWTKVKLEHSSGYEISSYPNIHYNAKNINVLLISFRECEVKAGNCREKFFYTEDGLKSLKPLPIEANICKFVHASKEIDVGSDNALLCSVNTLNSFGHIVESKLLKSDDFFKNAKELHSHFTKTGSIIAIAVELNFIVVVIQNDKFSVFSKVSLLTSKDAENFHLSDLKVDFAYGIMQFLDSSPLSMFLAVMKAENHRFLAATLYASDSRGAGFEKVLEDVQDGAVKKVQTVDGAWLANVLSEASSDDAEDDLVDIIISGGSKRIIQSKFTFNDGKDWDLLKVNEDDCKISDGCSLHLLTPAERDGEGKFVTGPTPAILLAVGSKGKSLAKHMNKMQTWISRDGGATWKKAIDEPCVFIFGDQGNVILAIPYAEKGGKSTSKYYYTLDQGSSWVEGHLEFPIYPLTLTTTTDGTSTKFIASGLYDETPDNQHDVDFSEVFYTFDFSAAFGGNQCADSDFEEVYARVTDDNNPVCVYGHKEKFKRRKQDAKCFVNKLFEDVKVYDDPCECGERDFECSRGFMISQKGNTCIPNPRAIRHICRQEGKKELSLPDKALIDGDKCLMNKKSTKDFVSDVKLKCSDYLNGNGDGGNTKPGGDSKDEVVTTFLEFEGEMKLYSYVEYADEENKYKSENIVLRTSDKRVYVSNNGGVSFNKVPIADNIIAYYVGYVQGQVVLVTDTDIIYLSDDGGSTFKKTAVPNKAVLHSRAISFHKTNKNMFIWYGSDNCDVDSPDCDYFSYITKDGGSTFNQLKDKVVQCDFISPFLESKEHSGDDLVFCSVLDRSSGKLSLQGSDDYFQSSLTLFDHIVGYAITGNFVVVATVTVKDGKSELEAKVTIDGSQFAAADFPSDFHVDSKQAYTILDSQSKAIFMHVTTNSRENEEYGSILKSNSNGTSYVLSIEKVNRNRVGYVDYDRIDGLEGVIIANVVGAEKDTNKKLKTMITHNDGGEWSLLTPPVTNSLGNKYPCTNQPLDRCSLHLHGFTERPDYRDTFSSSSATGLLIGVGSVGASLDSYEQSSTFMSNDGGITWKEIQQGVFMWEYGDRGTIIVLVDAKETDTLLYSLDDGETWVKYKFAEKPVIIDDLATVPSDTSRKFLIFARASGDTKSTIAYSIDFTNAHRRQCQLDLDNPANDDFDYWSPRHPLLPNDCLFGHESKYLRRAKGHNDCFIGSAPLTQGFKVTRNCSCTRRDFECDYNFYRDTDNTCKLVKGLSPTDRKNDYCKKENAFEYFEPTGYRKIPLSTCIGGKEFDTWDSRPCPGKEKEYNIHYGKEISSGKFLLLVLVPLFVFCFATWFVYDRGIRRNGGFKRFGQIRLDLDDDEFHPIEDNQVDVVVNRIVRGGIYTVAGLYAVFKTLRTVDRMLLDRVASVVFRRSPGRRNYVQVPDIDEEDELFGDFQDDYEEEIEEGANIAQDFRDNEDDIAGLENEETPQDVDGRLFNIDEHSDEEPLVQQ

SEQ ID NO: 31 - protein, 557 aa, Saccharomyces cerevisiae
MPQRIELTSEPVRKPRSTESSLLRKIQRACRSTLPEPDLGLNLDVADYINSKQGATPREAVLAIEKLVNNGDTQAAVFALSLLDVLVKNCGYSIHLQISRKEFLNDLVKRFPEQPPLRYSKVQQMILEAIEEWYQTICKHASYKDDLQYINDMHKLLKYKGYTFPKVGSENLAVLRPNDQLRTPSELQEEQERAQAAKLEELLRSGKPDDLKEANKLMKIMAGFKDDTKVAVKQAINNELNKLKRKADLFNEMLTSADEPDLENEAIQELYGDLKSAQPKFKKLIEEERDDDALVSNLSKFNDLVIQLLKRYKSIKGMKEEELNVPDTNEPAKELNLIDFDDDTTANTPSVTSPSKSLQPFDDLLGDFNKVSLSSPKSPQENDTVVDILGDAHSKSSGIDLLDFDSQPGESKTALSAYSNSIVLPNGLLNSSSNSKEITAQSQRHILNQSDHLRIDYELTRESMTKLRLVIFYSNISSDPITNFALLVASPKGTTLSLQPQSGNMLQSNSRDGIKQIASVEGISVNLGKPIKLKWKANYCTKGDSKEESGTTSLPTI

SEQ ID NO: 32 - protein, 585 aa, Saccharomyces cerevisiae
MSHPHSHSIYLSELPVRKPQALGNPLLRKIQRACRMSLAEPDLALNLDIADYINEKQGAAPRDAAIALAKLINNRESHVAIFALSLLDVLVKNCGYPFHLQISRKEFLNELVKRFPGHPPLRYSKIQRLILTAIEEWYQTICKHSSYKNDMGYIRDMHRLLKYKGYAFPKISESDLAVLKPSNQLKTASEIQKEQEIAQAAKLEELIRRGKPEDLREANKLMKIMAGFKEDNAVQAKQAISSELNKLKRKADLLNEMLESPDSQNWDNETTQELHSALKVAQPKFQKIIEEEQEDDALVQDLLKFNDTVNQLLEKFNLLKNGDSNAASQIHPSHVSAPLQQSSGALTNEINLIDFNDLDEAPSQGNNNTNGTGTPAAAETSVNDLLGDLTDLSISNPSTANQASFGLGGDIVLGSSQPAPPVTTTNNSNNTLDLLGLSTPQSPTNSQAVNSSGFDLLMGFNPTTGTTTAPARTLVNQSPNLKIEFEISRESNSVIRIKSFFTNLSSSPISNLVFLLAVPKSMSLKLQPQSSNFMIGNAKDGISQEGTIENAPANPSKALKVKWKVNYSVNSTQAEETAVFTLPNV

SEQ ID NO: 33 - protein, 570 aa, Pichia pastoris
MSLSQVPGVNGKLLRRIHRACKPTLDEPNLALNLEICDLINEKQGSLPRQAAIAVVKLVNSRDPQVSELSLSLLDNLVKNCGYPFHLQISRKEFLNELVKKFPDRPPPRYTRTQRLILGAIEEWTETICKTSRYKEDFGFIRDMHRLLGFKGYIFPEIKKEDAAVLNRSDHLKSIEELQKEERLAQSAKLQELIRRGRPQDLKEANKLMKVMSGFQEDKSFEVSKQEVAENIEKLKRKADIFGDMLNNATNVGKIDPTDETISELYGTLKSSQSTIQKLAQEESDDPEAVNTLLSLNDQVYSLLEKYNFLKEGDISNASKVKSGGGINLIDFDDDDTGSVSPVNANTNESDAVADLLSDLTFNERQASTSVNNSNSINDLLNLGSGTIHLGSPGPQSQIQEAQSPSLPQQQSNSALDDLLNFGSAAKSTGTTTAPAALDPFGMDFPSTTNSVVSQKRFLLHESHHIKIEYEVQSVNPFHFRFFYSNVAVQPVTSFQFLVAVPKLWDLQLKPQSSNFLASNTKDAIWQDVTITSKSGDSSAKDVKIKWKIDYAVSAVTAVEDGVAVIPQSQ

SEQ ID NO: 34 - protein, 511 aa, Saccharomyces cerevisiae
MDNYEGSDPWNTSSNAWTKDDDHVVSTTNSEPSLNGISGEFNTLNFSTPLDTNEEDTGFLPTNDVLEESIWDDSRNPLGATGMSQTPNIAANETVIDKNDARDQNIEESEADLLDWTNNVRKTYRPLDADIIIIEEIPEREGLLFKHANYLVKHLIALPSTSPSEERTVVRRYSDFLWLREILLKRYPFRMIPELPPKRIGSQNADQLFLKKRRIGLSRFINLVMKHPKLSNDDLVLTFLTVRTDLTSWRKQATYDTSNEFADKKISQEFMKMWKKEFAEQWNQAASCIDTSMELWYRITLLLERHEKRIMQMVHERNFFETLVDNFSEVTPKLYPVQQNDTILDINNNLSIIKKHLETTSSICKQETEEISGTLSPKFKIFTDILLSLRSLFERYKIMAANNVVELQRHVELNKEKLESMKGKPDVSGAEYDRIKKIIQKDRRSIIEQSNRAWLIRQCILEEFTIFQETQFLITRAFQDWAKLNSNHAGLKLNEWEKLVTSIMDMPISRE

SEQ ID NO: 35 - protein, 507 aa, Pichia pastoris
MSDSLFGSNILESEDPWAEPGAFSSNKLNSSEFKPDWHPSGTADLQTAEDPLVDPFKQEDVFIKSTFEEPTSSRSIEAVKSAEIDSELGEADVEIPNLWSDTVQEFNPLSPHNNSSNHMVTVKEIPEKQGLLFKHINYLVTHNIKFSGEYLKHAEQSTQNKKVIMFLTVPNDFTNWKKIANIDTSDEFEGVKVRIPTRFRLTLDKLYLNDEAQESQEEYEEDRAGAAANEHAINLQTTFKNIEHVWEENPTNYHNKDFMDNINLITVNLGKIHEIWTKLCILVERSERREHALALDKAKFGDFLGIFIKHNHTVYDLNNLANPKIIKHQRPNEEQQNLGIINNILLSVTNLTKKSKELKDEEVKIIGSDILESFKNYQDYITSLHFLFDRLKEYHQISSRDVSFLLSRIEKSNTRLLQIKSKSDVKGSDVDRLITNIQVSHDEILKIITRIILIKKCVMNEYKMFQTTKYLVSEILQDFFMKRVKYSDLQHEALVKCFHDLQDLPLK

SEQ ID NO: 36 - protein, 288 aa, Saccharomyces cerevisiae
MSEDEFFGGDNEAVWNGSRFSDSPEFQTLKEEVAAELFEINGQISTLQQFTATLKSFIDRGDVSAKVVERINKRSVAKIEEIGGLIKKVNTSVKKMDAIEEASLDKTQIIAREKLVRDVSYSFQEFQGIQRQFTQVMKQVNERAKESLEASEMANDAALLDEEQRQNSSKSTRIPGSQIVIERDPINNEEFAYQQNLIEQRDQEISNIERGITELNEVFKDLGSVVQQQGVLVDNIEANIYTTSDNTQLASDELRKAMRYQKRTSRWRVYLLIVLLVMLLFIFLIMKL

SEQ ID NO: 37 - protein, 270 aa, Pichia pastoris
MSSFDEGIALEEQPIYQDLPDFNEKANKLSNKLIVISNDIQKLKQSLGFFDKYLNKDYNYQQFNKYQKNALQLINKLMAQFRDITADKKYLMDLRFVDISAVQKFQKDQLVNGISDNLNEFKELQNWFTRLDSKLNEMEVVEQEARIQQQQQQQAQEGEQIIIEYEPINAAELEYQQDLINERELEIENIANGIVELNELFQDLGTLVTSQGELMDNIENNLYSVVDDSRAGHSELRRAEAYQKRSTGLCMWLLVILAVILLFILLIIFA

SEQ ID NO: 38 - protein, 704 aa, Saccharomyces cerevisiae
MDEHLISTINKLQDALAPLGGGSQSPIDLPQITVVGSQSSGKSSVLENIVGRDFLPRGTGIVTRRPLVLQLINRRPKKSEHAKVNQTANELIDLNINDDDKKKDESGKHQNEGQSEDNKEEWGEFLHLPGKKFYNFDEIRKEIVKETDKVTGANSGISSVPINLRIYSPHVLTLTLVDLPGLTKVPVGDQPPDIERQIKDMLLKYISKPNAIILSVNAANTDLANSDGLKLAREVDPEGTRTIGVLTKVDLMDQGTDVIDILAGRVIPLRYGYIPVINRGQKDIEHKKTIREALENERKFFENHPSYSSKAHYCGTPYLAKKLNSILLHHIRQTLPEIKAKIEATLKKYQNELINLGPETMDSASSVVLSMITDFSNEYAGILDGEAKELSSQELSGGARISYVFHETFKNGVDSLDPFDQIKDSDIRTIMYNSSGSAPSLFVGTEAFEVLVKQQIRRFEEPSLRLVTLVFDELVRMLKQIISQPKYSRYPALREAISNQFIQFLKDATIPTNEFVVDIIKAEQTYINTAHPDLLKGSQAMVMVEEKLHPRQVAVDPKTGKPLPTQPSSSKAPVMEEKSGFFGGFFSTKNKKKLAALESPPPVLKATGQMTERETMETEVIKLLISSYFSIVKRTIADIIPKALMLKLIVKSKTDIQKVLLEKLYGKQDIEELTKENDITIQRRKECKKMVEILRNASQIVSSV

SEQ ID NO: 39 - protein, 686 aa, Pichia pastoris
MDEHLISTINKLQDALAPLGGGSQAPVDLPQITVVGSQSSGKSSVLENIVGRDFLPRGTGIVTRRPLVLQLINKRPLKTANASLIDIKTVGQDGLKTENNTEEYGEFLHLPDKKFYNFEDIRQEIVKETDKMTGKNAGISAIPINLRIYSPHVLTLTLVDLPGLTKVPVGDQPKDIEKQIREMIMKFISKPNAIILSVNAANQDLANSDGLKLAREVDPEGTRTIGVLTKVDLMDKGTDVIDILAGRVIPLRYGYVPVINRGQRDIEQNKTIKDALQNEKQFFENHASYASKSHYCGTPFLAKKLNSILLHHIKTTLPEIKNRIETALSKYSNELATLGTEVLDSPSSIILNTITDFCNDYNSILNGQSKDISSNELSGGARISFVFHEIFKNGIYALDPFDQIKDTDIRTIMYNSSGSAPSLFVGTQAFELLVKQQISRFHEPSHKCINLIYDELVRIINQILNQNQYARYPLLKEQINQTFVQFLREALIPTDKFCKDIVTAEQTYINTAHPDLLKGSQALSIVQEKLNPSRPNLDPKTGKPIKQQQQTPSPEDDDRGSSFFSGFFSSKNKKKLAAMEAPPSVLKASGTMSDKETQETEVIKLLIQSYFNIVKKSIADIIPKSVMLKLIEFSKSEIQKVLLEKLYNNNDLDSIVKENDVTVARRKECIKMVEALQHANEIVNNV

SEQ ID NO: 40 - protein, 1274 aa, Saccharomyces cerevisiae
MEQNGLDHDSRSSIDTTINDTQKTFLEFRSYTQLSEKLASSSSYTAPPLNEDGPKGVASAVSQGSESVVSWTTLTHVYSILGAYGGPTCLYPTATYFLMGTSKGCVLIFNYNEHLQTILVPTLSEDPSIHSIRSPVKSIVICSDGTHVAASYETGNICIWNLNVGYRVKPTSEPTNGMTPTPALPAVLHIDDHVNKEITGLDFFGARHTALIVSDRTGKVSLYNGYRRGFWQLVYNSKKILDVNSSKEKLIRSKLSPLISREKISTNLLSVLTTTHFALILLSPHVSLMFQETVEPSVQNSLVVNSSISWTQNCSRVAYSVNNKISVISISSSDFNVQSASHSPEFAESILSIQWIDQLLLGVLTISHQFLVLHPQHDFKILLRLDFLIHDLMIPPNKYFVISRRSFYLLTNYSFKIGKFVSWSDITLRHILKGDYLGALEFIESLLQPYCPLANLLKLDNNTEERTKQLMEPFYNLSLAALRFLIKKDNADYNRVYQLLMVVVRVLQQSSKKLDSIPSLDVFLEQGLEFFELKDNAVYFEVVANIVAQGSVTSISPVLFRSIIDYYAKEENLKVIEDLIIMLNPTTLDVDLAVKLCQKYNLFDLLIYIWNKIFDDYQTPVVDLIYRISNQSEKCVIFNGPQVPPETTIFDYVTYILTGRQYPQNLSISPSDKCSKIQRELSAFIFSGFSIKWPSNSNHKLYICENPEEEPAFPYFHLLLKSNPSRFLAMLNEVFEASLFNDDNDMVASVGEAELVSRQYVIDLLLDAMKDTGNSDNIRVLVAIFIATSISKYPQFIKVSNQALDCVVNTICSSRVQGIYEISQIALESLLPYYHSRTTENFILELKEKNFNKVLFHIYKSENKYASALSLILETKDIEKEYNTDIVSITDYILKKCPPGSLECGKVTEVIETNFDLLLSRIGIEKCVTIFSDFDYNLHQEILEVKNEETQQKYLDKLFSTPNINNKVDKRLRNLHIELNCKYKSKREMILWLNGTVLSNAESLQILDLLNQDSNFEAAAIIHERLESFNLAVRDLLSFIEQCLNEGKTNISTLLESLRRAFDDCNSAGTEKKSCWILLITFLITLYGKYPSHDERKDLCNKLLQEAFLGLVRSKSSSQKDSGGEFWEIMSSVLEHQDVILMKVQDLKQLLLNVFNTYKLERSLSELIQKIIEDSSQDLVQQYRKFLSEGWSIHTDDCEICGKKIWGAGLDPLLFLAWENVQRHQDMISVDLKTPLVIFKCHHGFHQTCLENLAQKPDEYSCLICQTESNPKIV

SEQ ID NO: 41 - protein, 1351 aa, Pichia pastoris
MDSPDTKGSQGRLYSPSIVSSSTVNRSSFDERLKTRFSVVSIEENVLKNGSSSPIKDDDNEPIKWIKLKKLSAHFTHATRIEHGAPISMATGSQICIGTSKGFVLIFDYKQELRTILKSATTYDPITVLTLSADSTHVASGHQSGDIYLWEISKSVPILKIPAIPKEDLLKNPKANGHLHNTPIHNLYFMGKRRTALLSTDITGIMVQHNGYRNIRGLRVQTKNVLGKYHMNNNKITDSTILSFAPLALGTAMDRTDNIGVIALMTSNVLLVISTNPSLQTHFKVGKPKSMNKRLPITGSLAWFPAVKTENGKRQPKLAYCWSNVLTVLDCNNESIKDSQDQESLILKLENKKRWAGREAIISVSWLTKDIIALITESHRLLLINYDTMTVSSIIDLFTKSIHVTQLFKPTTEIDRLTPFMYHCVFKVYKHRLFILGKHDIYIGTLNNWADRLLELLSKGDYLEALTKAKDYYDGNCDLNLLRLPKDDNRRHLVVSSHILQIMTASLDFIFSKKQLQDEAFLELFLENCINCSITIDVDQSTYDQFYEAYMIHGYEYLFFNTLEPFILNNKIHTLTPSILKAMIPFYLKMNRGERVEQLVCLLDIEQLDIDATVQLCEEYKLQDLLIYVTNYLFQDYITPLVNFIKKIIQISNEAANLSVLELESLSAEARSVYGYITYILTGRHYPIERLIDFDKETQAKSSVYYVLFNGTSIEWPKGAGKLHITNDLEHEPAFPYLYLLLKYDCFSMLSALNEVFEDSQLNDEDINYSFSNDLQNWKVSRQYVVDVLLGVFNDNDFKDQENTLLAIFIARNYPKYKQFIRLSESVLHEVLTKLCIIPDPSLKKECELSLQSLLSVYHIPNLNEWISVFEECGFFNVLFNVYKYEHKYDTFLKLWLQEKQKQALQDVGDDSDESYNDIGTLVETLENCFESVGKNSQEKAGIETFLSENFEALFSIEKPSNIVRVLNKYCPKLHYNILRSSNEELQYEYISAMVEQEKCSYGSVVYIEFRTLYVKLLCEFDQEALLEFIKKIEVSTIDAIAAESYLTKFHQIEALVLLLEKERKQREALQILIQHISTLGQQLQLENTKSDVHRIEGQLWKFLMMVIEILKIENDEELMVQVMEMPVALFNSFTEGGNDSKETTNILKRFVQDTFMNIIGIYQSTTAPENVKSTFVDVFSSFLQRASSKITTLGDVRAVLREIFIVYGFEKVILNITLGLINEDIYKVMEKLHSKKYLGWTTGVTDCVICGKKLWGSSMPNEVYSMWEEGILEDDQSAKKTSFFINDEGELMTNSTVNGAMQIEPVQLNDYSPYELVVFRCRHGYHSKCLFNLGTQKKIKCIICAADDAQ

SEQ ID NO: 42 - protein, 451 aa, Saccharomyces cerevisiae
MTDDEKREILKEFDPFSQLEQANGNPDKDVKFKKDDPNRAAAEETNRDISAQDKGDEEPFYDFQIFIKQLQTPGADPLVKYTKSFLRNFLAQRLLWTVSEEIKLISDFKTFIYDKFTLYEPFRSLDNSKMRNAKEGMEKLIMGKLYSRCFSPSLYEILQKPLDDEHMKDLTNDDTLLEKIRHYRFISPIMLDIPDTMPNARLNKFVHLASKELGKINRFKSPRDKMVCVLNASKVIFGLLKHTKLEQNGADSFIPVLIYCILKGQVRYLVSNVNYIERFRSPDFIRGEEEYYLSSLQAALNFIMNLTERSLTIEDHEDFEEAYQRNFKQLAEEKEEEEKKKQLEIPDELQPNGTLLKPLDEVTNIVISKFNELFSPIGEPTQEEALKSEQSNKEEDVSSLIKKIEENERKDTLNTLQNMFPDMDPSLIEDVCIAKKSRIGPCVDALLSLSE

SEQ ID NO: 43 - protein, 607 aa, Pichia pastoris
MSFNKSFNKLGSAKATASVSTAKGDSVSANPTRSESESDRGHKQLINILGQFEPHHDNKQWTSIEASTVSDQDLFANDDDSDDDGDEDDEEEEGDVIENEKLPFKEGPSIAEKDEQRIDKKPESSKLAAEVEPQVNVSNENEDSSEPDHSAIPSTAKEGIENITKGVDSIQVKSENKSKSERLTKQNSAKKTLTKFDFQRFLKQLRSKDCEPVLKYIKSFLTQFQARTWSVDEQIKLVKEFQQFIFGKLIECKPFDNLSTDEDVNNTMEGLEKFIMSRIYNDTFPPLMVERKLSPSHREDLSRDKIYHINLKKYRWIQPKHLDIHLKIDSETSFVKLAGTELSKVNDYKSPRDKIICILNCCKVIFALIRQQQKIHKVEENADIFVPLLVFVILKCKTRNLISNLSFIERFRNDRFLVGESSYYVSSLQIAANFITTIEQSLLTISAEDFAAEIENNERKLKEESIKRKREQKILEEKKAQEDAQKQGLFSPLTEMIAGTGKGEDFAPSQVLKSSAGIFQQSLSTLFSSPSRESSPVSSSVDELKTAKKQSLEESKKEARIKSERETTLKNLKQMFPDMDSEILLDIAIAKNSNIGDCIDACLELTE

SEQ ID NO: 44 - protein, 1454 aa, Saccharomyces cerevisiae
MGAQLSLVVQASPSIAIFSYIDVLEEVHYVSQLNSSRFLKTCKALDPNGEIVIKVFIKPKDQYSLRPFLQRIRAQSFKLGQLPHVLNYSKLIETNRAGYMIRQHLKNNLYDRLSLRPYLQDIELKFIAFQLLNTLKDIHNLNIVHGDIKTENILVTSWNWCILTDFAAFIKPVYLPEDNPGEFLFYFDTSKRRTCYLAPERFNSKLYQDGKSNNGRLTKEMDIFSLGCVIAEIFAEGRPIFNLSQLFKYKSNSYDVNREFLMEEMNSTDLRNLVLDMIQLDPSKRLSCDELLNKYRGIFFPDYFYTFIYDYFRNLVTMTTSTPISDNTCTNSTLEDNVKLLDETTEKIYRDFSQICHCLDFPLIKDGGEIGSDPPILESYKIEIEISRFLNTNLYFPQNYHLVLQQFTKVSEKIKSVKEECALLFISYLSHSIRSIVSTATKLKNLELLAVFAQFVSDENKIDRVVPYFVCCFEDSDQDVQALSLLTLIQVLTSVRKLNQLNENIFVDYLLPRLKRLLISNRQNTNYLRIVFANCLSDLAIIINRFQEFTFAQHCNDNSMDNNTEIMESSTKYSAKLIQSVEDLTVSFLTDNDTYVKMALLQNILPLCKFFGRERTNDIILSHLITYLNDKDPALRVSLIQTISGISILLGTVTLEQYILPLLIQTITDSEELVVISVLQSLKSLFKTGLIRKKYYIDISKTTSPLLLHPNNWIRQFTLMIIIEIINKLSKAEVYCILYPIIRPFFEFDVEFNFKSMISCCKQPVSRSVYNLLCSWSVRASKSLFWKKIITNHVDSFGNNRIEFITKNYSSKNYGFNKRDTKSSSSLKGIKTSSTVYSHDNKEIPLTAEDINWIDKFHIIGLTEKDIWKIVALRGYVIRTARVMAANPDFPYNNSNYRPLVQNSPPNLNLTNIMPRNIFFDVEFAEESTSEGQDSNLENQQIYKYDESEKDSNKLNINGSKQLSTVMDINGSLIFKNKSIATTTSNLKNVFVQLEPTSYHMHSPNHGLKDNANVKPERKVVVSNSYEGDVESIEKFLSTFKILPPLRDYKEFGPIQEIVRSPNMGNLRGKLIATLMENEPNSITSSAVSPGETPYLITGSDQGVIKIWNLKEIIVGEVYSSSLTYDCSSTVTQITMIPNFDAFAVSSKDGQIIVLKVNHYQQESEVKFLNCECIRKINLKNFGKNEYAVRMRAFVNEEKSLLVALTNLSRVIIFDIRTLERLQIIENSPRHGAVSSICIDEECCVLILGTTRGIIDIWDIRFNVLIRSWSFGDHAPITHVEVCQFYGKNSVIVVGGSSKTFLTIWNFVKGHCQYAFINSDEQPSMEHFLPIEKGLEELNFCGIRSLNALSTISVSNDKILLTDEATSSIVMFSLNELSSSKAVISPSRFSDVFIPTQVTANLTMLLRKMKRTSTHSVDDSLYHHDIINSISTCEVDETPLLVACDNSGLIGIFQ

SEQ ID NO: 45 - protein, 1340 aa, Pichia pastoris
MGAELSLLAPTAQPIALSAYVDFLSNIQYNKPLGTSRFLKTVKGLNDQGSIVVKVLVKPNSGLDLSEWVEKLEFLRLKLLDVPNVIPYNLVIDSVRAGYLIRPFQQRTLYERVSIQPYLEPIEKKWIAFQLIHAVMECHERGQYHGDIKSENVLLTSWDMVFLTDFAPFKPIYLPGNNPSQFSFYFDTSRRNVCYVAPERFLGEGTPTQYQEVDKLTSSMDIFSLGCTVAELFLEGSVLFTLPQLFKYKKGEYTPSLSGIVDNDLRNMIQEMIDLDPRKRISAHDCLRKHRGKVFPEYFYSFLYDYMLELSTPSDHSVGNWRFDECDRRIERIYNDMGMICDKLDVNLDLNIVHSFTEEPSQNVIPMTLRLPGVEPHIPQSSKTPYDSALIILNILLHSMRNTTHSSYRIKSCDLILMISEMLSDEQKLDRCLPYLVHLLNDPSIDVQAAALKYMTQLLLLVDYLTPVNVLIFPEYILPKLASFLSTTKGSYMRMIFATILPHLAKTALKFYEMAILLGSHVEKFELLKNFENLTIQLLIDPDSSAKISLLKNILPLASVFGKDKTNDIILSHMITYLNDPDENLRVAFIESILGLSIFVGITSLENYILPLLVQTLTDNSEIVVVNVLRSFAELNNLGLIKKRYKFDLIKVSSKLLLHPNSWIRLGTLRLLISVVKDLSLTDFYCLLYPLVRPFFEYEVTNFDWATLYPCIIKPIPRSIYTLSITWALKAEKTLFWQQVKLAKPDPFGSRNSTFLLNRNSKIGESGVVSNNQIPTSPEDIGWLGKLKASGFDEKDLWKIATLRDYIFRVARSRSNIPTQENNEVTMQQMGIYPRIVFFEKGSMYETEGFVTGSSMMANYRILVNSEYSPESLTKRKTVGGVNTNHTYSGANPYILKFLECIKFRHVLDDSEEFGPSIPSATVEEGHWKFEGVLVSHLTEHTGSITSLALSPDQQYFLTGDSKGIIRLWDVLQLERNGYATSHVTVSMSSSVKDIKFIENRNSFCAVTADGEIKIFRVEINSTSSSVRSNGSPHRHESISLLREHSLEGEHISDMKFIGPNLAVTTLSCKLILFDLRDMQIAEEIQNPVSHGFITSFDLDSSQSWLLIGTSKGILDFYDLRFELLVKSWKLKSTSYPIKHITVPPAGFTCNRKSERFALINGGTNDSVTIVFDVSKGQCSELYFTETVNLNTAIDNYEVLEVDNGEERTRTSVLATEVEDRSITSLTMLGSNQFLTATFDKRVILWDTGNKANSSALISKLDDFTSSFSSVQVRPHLMAINEKIVEKDPQNIGGPKRNMASANSSTFDLHSDIITGIAVIQKPLKMLILVDRAGVINIYK

SEQ ID NO: 46 - protein, 515 aa, Saccharomyces cerevisiae
MDLENVSCPICLRKFDNLQALNAHLDVEHGFNDNEDSLGSNDSRLVNGKQKKARSVDSSAQKLKRSHWEKFKKGKSCCHTCGRTLNNNIGAINCRKCGKLYCRRHLPNMIKLNLSAQYDPRNGKWYNCCHDCFVTKPGYNDYGEVIDLTPEFFKVRNIKREDKNLRLLQLENRFVRLVDGLITLYNTYSRSIIHNLKMNSEMSKLERTVTPWRDDRSVLFCNICSEPFGLLLRKHHCRLCGMVVCDDANRNCSNEISIGYLMSAASDLPFEYNIQKDDLLHIPISIRLCSHCIDMLFIGRKFNKDVRMPLSGIFAKYDSMQNISKVIDSLLPIFEDSLNSLKVETAKDSENTLDPKNLNDLARLRHKLLNSFNLYNTLTRQLLSVEPQSHLERQLQNSIKIASAAYINEKILPLKSLPAILNPEGHKTNEDGQKAEPEVKKLSQLMIENLTIKEVKELREELMVLKEQSYLIESTIQDYKKQRRLEEIVTLNKNLEELHSRIHTVQSKLGDHGFN

SEQ ID NO: 47 - protein, 542 aa, Pichia pastoris
MIGRRVLGQVPNEGELSPTASPNGAESLSCPICNENMINLGQLNQHLDDTHTNNDPSESVNIGPSAPNSTTNSRISSPGLETSEISRSHWKKPKGNDFCHLKECKRRLNIKNGIVNCRKCGFLFCNEHTYYRIKVNQTLQYDPLGGQFVRCCITCFTNKPFFNNFEGFALDDTKTFQELREKRLESDRLKTIVLEKRLRKIFAFVYDRDNPSKVNNSEVTNYVKQIIHWQTDNELNNCPLCFKQFGRFLMRKHHCRLCGEIRCDDGCSLDIPMNYLKQLFDQSPETNEQYDQNHPTEDDTIVFDKVSLRICKLCKNRVFHRRLFTQNRSSSTGIDDLLSTIRLVNIYKEKIHQLLPGFEEDLQRLQTIDSASNSNQILPTKELEDDEQFLKMLVEKRYKIMSVFNKIDKIAKGLKLTIDQNDTLLSLKKPLAEGMTIDQLKIARSIYMQLASFLQENMLKLQKVPNLTNKPSTENEGLSKLEIREYRDKLMVLQEQHYLINSMIDDSKKKRKFDDLKILDENLADIETEIQTISRKLGDDSF

SEQ ID NO: 48 - protein, 210 aa, Saccharomyces cerevisiae
MNTSVTSIKLVLLGEAAVGKSSIVLRFVSNDFAENKEPTIGAAFLTQRVTINEHTVKFEIWDTAGQERFASLAPMYYRNAQAALVVYDVTKPQSFIKARHWVKELHEQASKDIIIALVGNKIDMLQEGGERKVAREEGEKLAEEKGLLFFETSAKTGENVNDVFLGIGEKIPLKTAEEQNSASNERESNNQRVDLNAANDGTSANSACSC

SEQ ID NO: 49 - protein, 218 aa, Pichia pastoris
MSSNKQITAVKLVLLGEAAVGKSSLVLRFVSNDFQENKEPTIGAAFLTQRCTIGDKTIKYEIWDTAGQERFQSLAPMYYRNAQAALVVYDVTKPKSFIKARHWVNELHEQASKNIIIALCGNKYDIVESEDNDVSTENEDDDSRKRKVSVQEGQTLADDEGLLFFETSAKTGFNVNEVFTTIGKHIPEATSSENAAGQERVDLTNRLDSSSTESTCQC

SEQ ID NO: 50 - protein, 875 aa, Saccharomyces cerevisiae
MSLNNITFCVSQDLDVPLKVKIKSLEGHKPLLKPSQKILNPELMLIGSNVFPSSDLIVSLQVFDKERNRNLTLPIYTPYIPFRNSRTWDYWLTLPIRIKQLTFSSHLRIILWEYNGSKQIPFFNLETSIFNLKDCTLKRGFESLKFRYDVIDHCEVVTDNKDQENLNKYFQGEFTRLPWLDEITISKLRKQRENRTWPQGTFVLNLEFPMLELPVVFIEREIMNTQMNIPTLKNNPGLSTDLREPNRNDPQIKISLGDKYHSTLKFYDPDQPNNDPIEEKYRRLERASKNANLDKQVKPDIKKRDYLNKIINYPPGTKLTAHEKGSIWKYRYYLMNNKKALTKLLQSTNLREESERVEVLELMDSWAEIDIDDALELLGSTFKNLSVRSYAVNRLKKASDKELELYLLQLVEAVCFENLSTFSDKSNSEFTIVDAVSSQKLSGDSMLLSTSHANQKLLKSISSESETSGTESLPIVISPLAEFLIRRALVNPRLGSFFYWYLKSESEDKPYLDQILSSFWSRLDKKSRNILNDQVRLINVLRECCETIKRLKDTTAKKMELLVHLLETKVRPLVKVRPIALPLDPDVLICDVCPETSKVFKSSLSPLKITFKTTLNQPYHLMFKVGDDLRQDQLVVQIISLMNELLKNENVDLKLTPYKILATGPQEGAIEFIPNDTLASILSKYHGILGYLKLHYPDENATLGVQGWVLDNFVKSCAGYCVITYILGVGDRHLDNLLVTPDGHFFHADFGYILGQDPKPFPPLMKLPPQIIEAFGGAESSNYDKFRSYCFVAYSILRRNAGLILNLFELMKTSNIPDIRIDPNGAILRVRERFNLNMSEEDATVHFQNLINDSVNALLPIVIDHLHNLAQYWRT

SEQ ID NO: 51 - protein, 967 aa, Pichia pastoris
MEKENNSVSFCLSKDLKIPFQIKILSFEGYKATNEEYRHNHEIFLTIQLVADNKLLLPSITKIVKYSHSVHHYLFKEKRNDSRSLWIKFPIHYSQLPLTCKLRFILFDYHGQTGERIVVGFTELNIFNIENDDEFEYSCALKRGSQKIPVKLSSENGEVTEASHTKHGLDDVNLQRKIKNFEINGKQNQSLSWLNELSNKKISQLNKLYSQKNCYLHVEFKTFDIPVVYSDVKYSLINIPTITDKIGSAINENDLLSNNIESALQTPDRNVFDPEQYRDSRNDDPIELKFRKLERTHQSSFTNKDIKPTLKMRENIINVLRKQFFEKLTLQEKNLIWKYRFFVLNNLILNKNYTSSQFNNFTVNFMKAINWDDDFEVKEFLTLIDKVPESTNSDEQELTSQMDHRFVFITQLEIVDCLELLRGNYQNPIVRNMAIDRLRLAPDKDLEFYLVQLVQCLRYETGNYDYEEMLDSSFSDDIVSSKYTFVDDDPIFRLLTDFRYLKQKHKKLPDLNSPLARFLIQRSIENERLTNFFYWCLKVETDGELLQDVKQPVNPSGSYEEFIEEDTRSPDAGSPSTITINKKSSNIFKITLTHFIVEMSTHENGKMKVKSLKEQVLVMKAIQNISLRIRNEFKKETTPAKIEILKSLLSEKRQGKWSLSSFPPIHLPLNPAIEVSGTIPEQSSVFRSSLSPLKITFKTIDNSSYPVMYKIGDDLRQDQFVIQLITLMERILQNENLDMKLTPYKILSMGAMEGLMEFIPNEALSSILKNNGSVLSFLKQNNPDPNSSLGVRAEVMDNYVRSCAGYCVITYLLGVGDRHLDNLLLSKDGHFFHVDFGYILGEDPKPFPPLMKLPIQVIEGMGGLNDENYKLFCNYCFITYITLRKNSSLILNLVQLMIDSSIPLLRTKNSDEQEKTEIILKIQEKFMLELNDEDAVLHFQNLINDSVNAFLPVVIDRLHNLAQYWRA

SEQ ID NO: 52 - protein, 439 aa, Saccharomyces cerevisiae
MKRFLLSRRQRHLRMICFHNISLFRANGDSKLIKEYGDGFIPCFFILESIRGELLYVSEVQSGSLRKLSFQELPKLTGASTMIVLKLVGLVPSDILCTISSDKNGIIDDKWCVLCTYTIDLNKLQPINEDTVLITGTNAPVLDLIDGSYTLAAEKIKPLKGLVSSHKRNISQVKIKFSLAYSSLLKLNKLLEYSSQVHEEINEISSKIEDDFLSLKNQNHWYMRTVQKSIETLEKEVLQRKKSKKNIEMAQLESNDTINHSKTELSLMSQDESINDDYGSIYSRFVQIKDRLDQLRFKKLYQLIGIFHSTDLFNSDRGYIYFEKPSSVNDVINRLKLKPLNIEILLRQAGESTKHREYVNSQLGYYLLFLHLTAIQIFKAPLPYRLMYYGSTSVIDSQYPLYFTDQMISKHQAKLIKAIHYFNADILQFKQILENYRPT

SEQ ID NO: 53 - protein, 577 aa, Saccharomyces cerevisiae
MNLFDVADFYINKIVTSQSKLSVANVNEHQRIKVLLLDKNTTPTISLCATQSELLKHEIYLVERIENEQREVSRHLRCLVYVKPTEETLQHLLRELRNPRYGEYQIFFSNIVSKSQLERLAESDDLEAVTKVEEIFQDFFILNQDLFSFDLQPREFLSNKLVWSEGGLTKCTNSLVSVLLSLKIKPDIRYEGASKICERLAKEVSYEIGKNERTFFDFPVMDSTPVLLILDRNTDPITPLLQPWTYQSMINEYIGIKRNIVDLSKVPRIDKDLEKVTLSSKQDAFFRDTMYLNFGELGDKVKQYVTTYKDKTQTNSQINSIEDIKNFIEKYPEFRKLSGNVAKHMAIVGELDRQLKIKNIWEISEIEQNLSAHDANEEDFSDLIKLLQNEAVDKYYKLKLACIYSLNNQTSSDKIRQLVEILSQQLPPEDVNFFHKFKSLFSRQDKMTQSNHDKDDILTELARRFNSRMNSKSNTAENVYMQHIPEISSLLTDLSKNALFRDRFKEIDTQGHRVIGNQQSKDIPQDVILFVIGGVTYEEARLVHDFNGTMNNRMRVVLGGTSILSTKEYMDSIRSAK

SEQ ID NO: 54 - protein, 568 aa, Pichia pastoris
MDLVKVGQSYVDKIVTDTGIKVLLLDDITSSIISLVSTQSELLNHQVYLIDKLENENRDTIKQLDCVCFLSVSEKTINLLVEELGAPKYKSYKLYFNNVVPNSFLERLAERDDLEMVDKVMELFLDYDILNKNLFSFKQLNIFNSIDAWNQQQFLLTLASLKSLCFSLQTNPIIRYESNSRMCSKLASDLSYEFGQSSKIMEKFPVNDIPPVLLILDRKNDPITPLLNPWTYQSMVHELLGIFNNTVDLTGTPSDLPPDLIKLVLNPSQDPFYAQSLYLNFGDLSDSIKTYVNEYKEKTVKHNSNELTDLNDMKHFLESFPEFKKLSNNISKHMGLITELDRKINENHLWQVSELEQSIAVNDNHNADLQELEKLLTSQEFKIANNLKVKLVCLYAIRYELHPNNQLPKMLSILLQQGVPEFEINTVNRMLKYSGSTKRLNDDSESSIFNQATNNLLQGFKQSHENDNIYMQHIPRLERVISKLVKNKLPTAHYPTLINDFLKKQRPVSDLNGARLQDIIIFFVGGVTYEEARIINNFNLVNKSTRIVIGGTTVHNTNSFMTQVLELE

SEQ ID NO: 55 - protein, 217 aa, Saccharomyces cerevisiae
MSSLLISYESDFKTTLEQAKASLAEAPSQPLSQRNTTLKHVEQQQDELFDLLDQMDVEVNNSIGDASERATYKAKLREWKKTIQSDIKRPLQSLVDSGDRDRLFGDLNASNIDDDQRQQLLSNHAILQKSGDRLKDASRIANETEGIGSQIMMDLRSQRETLENARQTLFQADSYVDKSIKTLKTMTRRLVANKFISYAIIAVLILLILLVLFSKFK

SEQ ID NO: 56 - protein, 219 aa, Pichia pastoris
MSRLFETYSSDIQMTLAEAKRNLANISASNSVDRTRQIRLVEENLDDSYDLLERLNLELQNVSTSDRTKYNVTLRDYQNTLTQLKEQLIQRIDEQDRNHLFQGSSFGSDADDNLSYTQRQQLLKSNASLERSSDRLRETSRIALETEDIGAGILNDLRSQREQIVNSRNTLLQADGYVDRSIQTLRTMTRRMATNKIISYAIIGVLIILIALVLVSKFY

SEQ ID NO: 57 - protein, 162 aa, Saccharomyces cerevisiae
MPREFKSFGSTEKSLLSKGHGEPSYSEIYAEPENFLEIEVHNPKTHIPNGMDSKGMFTDYEIICRTNLPSFHKRVSKVRRRYSDFEFFRKCLIKEISMLNHPKVMVPHLPGKILLSNRFSNEVIEERRQGLNTWMQSVAGHPLLQSGSKVLVRFIEAEKFVG

SEQ ID NO: 58 - protein, 154 aa, Pichia pastoris
MPSPFQSFQSNLSPSKHTQSFQELYGEPENFLEIEVINPITHGSGSSMYTDYEIVCRTNIPMFKFKESRVRRKYSDFDSFRKVLESQTNNVVIPKLPEKSFFNYHRFNDDFIEERRQGLQQFLKVIAGHPLLQTGSKALTSFVQDEHWNKSKFL

SEQ ID NO: 59 - protein, 663 aa, Saccharomyces cerevisiae
MRAHRIDTFLIRENIKLEIIHESNSYFGGEHISIAFRFKHLGSQHELFNYKEKLLTVDKAVEEKLEQQAKVQDDGEGTMENQTWSLKSLLGAFKRTGEPEESVDVDNMKMLNESKMLREKIQKQMYFHQPVTLISGYVQISGVFQYDSEVISESKFKQDEVKMVGLDIVPGHTTNSVLALEDGEHFKGKRNLTNYLNSDYTNVTNGLLFSESGSRGRTGTYNERTLMISNDTSIKTLPLLLIPQTLLFSEISLEPGEVRTFYFKSTKLPKDICPSYSSSKVASINYTLEVGADVLSDDNIEKFSNRVPITIAPYISSNAEQYTSRLDKPAIILKTGNIKELKPRLFTRKVSTASAVSFGRRKSSIIDIDSPLEDNEFVKRVKKNFIELVESNQNVSRDIDELIDLQMGVQFGKDEDSSDPEPNDSHFSNEMVTSAESSLRSDAVTKRRKSYSVRDNISNLEQKMWNDCSLVKSDENSNLLPQLINLQNAYQINRNNETMAKVSLSAPFYKTTDDINLVIELDPITTPLLKVTSLTVSLESFEIINPKYKTEGKGIGSKPKGNSVYEKHFICFDECKSVSVKLLPPRSPTNQITGQFKTDVFQHKWMIGLKFVIIAKTESITLDQFYEDKKGILFHSKENLEGEEFTCYVPIPILCTSEDFMGW

SEQ ID NO: 60 - protein, 585 aa, Pichia pastoris
MVTHTIYNQLVDNNVRVEVVYENYPVIAGTDELSLILRFRYLGKPKLPKEEHSEPDPEDKDAVNSSHKAGSSDTWSGFGRRISSQFSNVTRNVFLKELDKVEEQHEEDDEPVFVVGYTQLFGYLAINENIIDKKKLEDVRKRSVIGNKLAGIEGLELSDKTSNIWQFNNIEFLEPGKSNQIIPLYSTTQAMLFQEISLAQDPLKIFYVKVPLPKNLPPNYHSAALTINYKLLVGYQQFEKSGKISVRTLKFPLKLQAYVNRVGQQPFFTLDKPLLGQPIEAQVNEVTDGQKASFASIKSQLKHSDIESESDFSNDKIAVKPIEFLAFMQKLSQANINQVVEIQNEFHKEFLTDYTSPKNENCRLNLINLVSNPSQVLSLRQTERKPLQKNFEELNLFEYDSLLPAKFQTRFLLKRNTKNFAQVDLDKSVFRVNDIIRINIQLLNHIKTTGLIVALERVETISDQYIFKDEKGQIHENLTEQSQLVEKVCEKVVSTINSEQVSANLPIPYNSPGQFKTNIVNVRYLVTIKFILVEESSDLELIYSDNKGDLLRGVEFYSSGSEFLCRLPIKVVPNYEPNFGVVNYV

SEQ ID NO: 61 - protein, 1056 aa, Saccharomyces cerevisiae
MFIKQSEKNTPKCLYKKKGKVRVLLTGSCKKLNTWKMHLWPVSPPQLLRIPPRNAELGEGTKIDDCNILQSMTLPQANVLIMLTPTRVLIYNFKPMALVASHERTMASLKEFGDNRSMKRSAPYNDIIEGLISKKDSQYLLWHQGKLIFYVMTDKNFLLTYQILKNCTNEIIFKEYGIPVIEPLLMSEEEANSAEYDYNNDDDTLTVFDKNSSSRIIQNGFGITKEKGFLHFLSNQENIDELPVKKLELRLKVVLKFDYEIIDMIGIKTFSKVGDGRYEEVLIVLFPHGLQILTISDFKVSKSSLVEVKKGSKTIVCNKQLMVLSHDSVEKQTIVSIIDIEKQAVEAIPLTDTPDELLTCLEVNGYLVVVYKEKIICFDTRIKKVSHSWKPPFVIKLCDKINDKILLLVSEDSVNIHFYTEFGNLLFATYFDEDDYNGDNNNDNSKDKNEKKAAEYKISDFVCLDKSLITVSHSGKYQVWKLWEEIKQTQFDFRNPKCYVLTNTNNDVIIYSPVTSSSINNDNLQVIKLPTKTFNNHIAFVKINSSLRLFATYVSNKNILLIHNLETNMWSSFADQNVLDLHWLGDNYLVCHMKNDDGSTNLKCLQIPLQEANPDVELSDYVMWEYNVPENTIVFSLHVNTLSRYKLLKMKSKNHNASEKQPDALLKTAEIILVTDTQTIVFDVISTVHPCGLNIIKKFYQYLKINIPIDVLPNKIEWIINMKEGLLFFADRKFIKLGKVDGGGWQTLTLLDNIEKIIDVIRDEIFVVQGHNYVVYSLEDLWDDKKPLVSIPIEEDLYPISTTPETATTHTLHCIFNARFSKLVVKHQIYLDQLILAKLEDNTDLEDISHNYRFLKPYKFALEKILSTKILRSDSLDDILKLIKMYDNTDPEHNISPPTHSGMLEIISNCLRKIETKYWNHLFTNLKMTPRDLLALCIEENEAKMLGVLLLVFLNYDEKDLGDDLHFKKSDLGTEESKALNDNSTKKSEKSVTNLLKDEELMLKVLELLVTSAANATDPIKATDSWDMCFQLIRLLKELDRENNTQLVQKALERFK

SEQ ID NO: 62 - protein, 1033 aa, Pichia pastoris
MLWPYVVSHINSLPQVSLPDHANKDSNVIDDSSHTEPIIQISPNKYNLPTVAITKRSLYLFNYRTYSPIAAHVRKLSSLEEYGENKNVKITSDGFMFVVETSKNYLMVFTIHNLKNGEVTTLNEVQTVFSSNGTLLQQGFPLIETESSSITSFISTMFSRADLEYPNFDFGLRFKLVLKVQRPLVAFHSHSSDVLMLLSTDPLSFQVINLFSKNRTDGKHIEVLLLEQLDWYRIDQSEVKSWIYSKRWSCFFWLTEKGNIWKVRTEIGPSNGTTKLDGVCLYNQELEDQNDPKIVGLYLNDLQDCLYLVDENENIRIYHRTNEKLHLWRIVEKPLSLERLIDIQFSPSGQSFITRFFNGWNMYSSMGNLCFSSIDHSDSSIAEVDNWLQFVSDIRFTPSNDLIISKGSLFFVVGLINLNSSLNQCSNNCKRPILYTSEELFLFKGWDKNLTDYFKQDPALSRDATLWLPINIPTKFILKNLHITSISSDESGTLICVVGNKSALVYHVVTDKWKLFDLNSEVTLHQAESTSNEQNNNIIATGWWKNHLFMALRNIFDDNGKLISASKVLVFSTLRFDSNDEKETYFGAEEIIWSFDFEETSVDEFLLYFNCDVLRSQLIVVSSEFNVYTWSMSMESHEEKKTKGRLILQRGNVYRLKNLFAENDKLNSKRLKTLKYVSLIDEHNIVMLFEGIFYCVQRSLNKDPENPSLVKVGYTKEVISTGIEFIQVVSADVVIAFNGCKCLYFDLCQEKNISEVSPIFIDTGSESALASHRNLSKHQQDILNNKALTIRKTEGTQAYPILIMSEKSLLFGLDIEISTRTVAFEDTEKTSFILNFQTKKRNYLTDLIDHQLKDGGDFQLAEALHKFEKFKQFQNSLELLLLNHVMNSTGERSDKDVYFDRLHHLIQSTENSLGIYSNFLRKVEVRHWKLIFDKLDSDPRTILKHLLETENSHLLALNYFIIMLNYENEDEDAKSTISTQDRQMATKIMVNLINDKDYERSFELFRFIKLIDEVSAVEITKEIQQEIITPIDK

SEQ ID NO: 63 - protein, 675 aa, Saccharomyces cerevisiae
MDYEDNLEAPVWDELNHEGDKTQSLVSNSIESIGQISTNEERKDNELLETTASFADKIDLDSAPEWKDPGLSVAGNPQLEEHDNSKADDLINSLAPEQDPIADLKNSTTQFIATRESGGALFTGNANSPLVFDDTIYDANTSPNTSKSISGRRSGKPRILFDSARAQRNSKRNHSLKAKRTTASDDTIKTPFTDPLKKAEKENEFVEEPLDDRNERRENNEGKFTASVEKNILEQVDRPLYNLPQTGANISSPAEVEENSEKFGKTKIGSKVPPTEKAVAFKVEVKDPVKVGELTSIHVEYTVISESSLLELKYAQVSRRYRDFRWLYRQLQNNHWGKVIPPPPEKQSVGSFKENFIENRRFQMESMLKKICQDPVLQKDKDFLLFLTSDDFSSESKKRAFLTGSGAINDSNDLSEVRISEIQLLGAEDAAEVLKNGGIDAESHKGFMSISFSSLPKYNEADEFFIEKKQKIDELEDNLKKLSKSLEMVDTSRNTLAASTEEFSSMVETLASLNVSEPNSELLNNFADVHKSIKSSLERSSLQETLTMGVMLDDYIRSLASVKAIFNQRSKLGYFLVVIENDMNKKHSQLGKLGQNIHSEKFREMRKEFQTLERRYNLTKKQWQAVGDKIKDEFQGFSTDKIREFRNGMEISLEAAIESQKECIELWETFYQTNL

SEQ ID NO: 64 - protein, 660 aa, Pichia pastoris
MNDEPLSGSHWDDNAPSSSIFNVPDEVDPTLNPFKEEDDEVVGALQEVSLESDAETVSKDEERQPNLHEEDLDDNAANSFASGSNNDINTGVSGQDIEPDSQQQQEADIAKEQIKLKKTELLSSLTEGIEKEVKTSNFGPDGNLFGDTNTEELKSAMEASTTSPDRHTFSSSNRKKTVFRPRPRRIGGKVVVPSEPQDDPLNSSKDDDLSNETEANRDAPSVGKLLIESVDEPLFNITKKTIISPTVSPKKERKAAKPTSAIPDSNENMDRFDIVVDDPIKVGELTSAHVVYKIKTRTDSELVASKELSVTRRYRDFLWLYNQLVSNHPGFIIPPPPGKQVVGRFESKFIENRRLGLEKMLVNISRDRSLQKDMDFIIFISSEKFQEESKQREVIHHHNMNSSTAVVSENDTMSSGASLNNSGFMSSISNALSISAPKYVENDKYFIEKANYIEQLDQQLKNLLKTLDLITQQREELVTTIEEFLNTINELIDLEVSNDVSAIFLELHNLQTKSKELLERTNMQEVLTLTTTLDEYVRIIGSIRIVFENRFKVINNLLNLKSQVATKEKKLNKAKTKQHNQVDKIQRYERELSALSNAVDQETAKRDMIVDNVKKQLEIFEDKKVDDFRSMVEIYWESLIETQKEIIELWETFYEKCKFD

SEQ ID NO: 65 - protein, 551 aa, Saccharomyces cerevisiae
MTSAVPYDPYDDLDNNPFAEPQEEDSEPAATTTDGSSSMSEERVGTEQTAASVQDNGTANNIQNGLGEEGNATRSKTSNEHNENQQPSQPSERVILPERSDEKKKYTLLAKVTGLERFGSATGKKENPTIIFDCSTNLPTFRKQQYKNVKKSYEEFHQLFKYLNVAIQESFVPTLPSAYTTFGINSEEDRMKVTRNFQLWFNRLSQDPLIIRNEEVAFFIESDFNTYTPINKSKSLASGLKRKTLKQLAPPYDEITELAEFRPLVKSIYVVSQSLQEKLLRVSRNRKMMVQEENAFGQDFVNLDEHNKLYRRYGKILTAVGDIDSIIATMDMATLYDGLEWIVRDAYAVKEALTNRHFIMRNLVQAQQNSKAKQEQARRFRSRRDINPMKIDEALRQLKAAAKNEQVLTLKLQRITSNMIIERKQWISWYEEWIRSSIKEFTLRKIEYERKKLTLLERVRSDIRKADENGGLSRLGRHAVSNNNSDTSQTLKGDSWTGESNRKSQIPINKIAHTEFDDELFTEDDGYNSQDSDTTSLNARHAASLLGMSTK

SEQ ID NO: 66 - protein, 557 aa, Pichia pastoris
MSTTVPYDPEDFDNNPFSEQVIKTVDAGKQPKYANPQGGQGHSSVTAPLRLPTDSNQEPSYHITTNVENELVMPTETEIRRFIPERFNQNRRSICLVITDIEKNGTDSSAFKNPVIKFDAFIKGLNGFRKNSYKDIRRTYKELESFAKYLNINNIEVFVPGLPSIPTLYNMGSPEFKSSVSKLLQEWMDRITKNPILIKDHDFVLFLETNDFSYSPTKTMSQSIVATGLRRKTLKQLAPPFDACRRLAEFRPLVKSLYIVSQKLVSLLERIGKLDKNMNGLYSIFYRQLRELSMVEVEEDMPRLWTKLEKVMQLFNELDLMKRLSYNSALNECLLLVIRDSFTIKESLTNRHLLMRELSQAKDSARKKFEQVQKLKSKPIIDTLKADEASQSLEAVVALEKELEFKVDRLTYNMLIESEEYLNYFTETVRALFRTLAYQQIQFERKKLALLANAKLIDVSHSLHRLGRESLPLRKDPNRIEAWSGGSSSRNSTADASFERDMQEYETYLDNDFDTVLPVLNPSAQSSKKKVSTQSAGNNLTEFNAKNAANLLGGTTF

SEQ ID NO: 67 - protein, 379 aa, Saccharomyces cerevisiae
MSIFFKPPIDIEILFDNEESRKHVDIATRSSNSSYKSMKESLPVYEDGESLGGIVTLRVRDSKKVDHLGIKVSVIGSIDMLKSHGSGNSSSKKVTSSTSSSSSNGSVDVRKNSVDQFLCQSYDLCPAGELQHSQSFPFLFRDLSKRYESYKGKNVDVAYYVKVTVMRKSTDISKIKRFWVYLYNSVTTAPNTLSANETKATTNDIAGGNYAADNASDNTQTKSTQGEAADVNQVLPISHSNNEPKPVRLDIGIENCLHIEFEYAKSQYSLKEVIVGRIYFLLTRLRIKHMELSLITRESSGLQTSNVMTDSTAIRYEIMDGSSVKGETIPIRLFLSGYDLTPNMSCNYFNVKNYLSLVIIDEDGRRYFKQSEITLYRTR

SEQ ID NO: 68 - protein, 297 aa, Pichia pastoris
MSLFFKVPLDIEVRLDGEDSRETVEVKSAKGRKEKLPVYKDGETVKGQVSVRLKDNKRVEHLGIKVQLLGSIETKVDGIKNDEFLSMAHELASPGDLRHPETYHFEFRNVEKQYESYRGKNVRLRYYIKVTLGRKSADVIRERELWVFQKNQLPLGATKPDASIKMDVGIEDCLHIEFEYSRNRFSLKDVIVGRIYFLLVRLKIKHMELSLIRRESCGAPPNQVNDSETLVRFEIMDGAPVRGETIPIRLFLGGFDLTPTYRDVNKKFSTRTFLSLVLIDEDARRYFKQSEIFLYRE

SEQ ID NO: 69 - protein, 282 aa, Saccharomyces cerevisiae
MLLLALSDAHIPDRATDLPVKFKKLLSVPDKISQVALLGNSTKSYDFLKFVNQISNNITIVRGEFDNGHLPSTKKDKASDNSRPMEEIPMNSIIRQGALKIGCCSGYTVVPKNDPLSLLALARQLDVDILLWGGTHNVEAYTLEGKFFVNPGSCTGAFNTDWPIVFDVEDSDEAVTSEVDKPTKENQSEDDDAKGGSTGKEQPGSYTPKEGTAGERENENESNVKPENQFKEDEVDMSDSDINGSNSPSFCLLDIQGNTCTLYIYLYVNGEVKVDKVVYEKE

SEQ ID NO: 70 - protein, 263 aa, Pichia pastoris
MLLLAIGDFHIPDRASSIPAKFTKLLAPGDKIQQVLCLGNVCESPSTLEFLKGISPDFQMVKGEFDRDLSLPTSLVFNYDKLKIGLINGFNVIPNADPLSLLTQARLMNVDVLVSGGTHKIEAYTLDGKFFINPGSATGAFTTKAPSKADLEALNVDKNLAEDKEEDNDGKEDKDNKEREHQKQANEKTSEKPSPQTFKGETSNQVTPDEDDLDNINTDSLEQLDPIPSFCLLDIQGNVCTLYLYTCIDGDVKVDKVSYRKED

SEQ ID NO: 71 - protein, 557 aa, Saccharomyces cerevisiae
MKCQTCHLPLQLDPSLEGLSLTQRNLLLSNNSIITATNENVISNKGIEAADNCGPQIPKERLRRLGEIQNIKDLNLKDDKLITDSFVFLNHDDDDNANITSNSREDQRYGNANGNDNKKANSDTSDGTSTFRDHDEEEQEATDEDENQQIQLNSKTLSTQVNAMTNVFNILSSQTNIDFPICQDCCNILINRLKSEYDDAIKERDTYAQFLSKLESQNKEISESNKEKQYSHNLSEKENLKKEEERLLDQLLRLEMTDDDLDGELVRLQEKKVQLENEKLQKLSDQNLMDLNNIQFNKNLQSLKLQYELSLNQLDKLRKINIFNATFKISHSGPFATINGLRLGSIPESVVPWKEINAALGQLILLLATINKNLKINLVDYELQPMGSFSKIKKRMVNSVEYNNSTTNAPGDWLILPVYYDENFNLGRIFRKETKFDKSLETTLEIISEITRQLSTIASSYSSQTLTTSQDESSMNNANDVENSTSILELPYIMNKDKINGLSVKLHGSSPNLEWTTAMKFLLTNVKWLLAFSSNLLSKSITLSPTVNYNDKTISGN

SEQ ID NO: 72 - protein, 444 aa, Pichia pastoris
MNEAEYKCQRCRLPLTIDGSLEDLSISQANLLTGRNGNFTKNTIPLEDAVEEDLPKVPQSRLNLFKEVYQKMDHDFTNARDEFVVLNKHNDNSDVNVEYDYEENNTISRRINTMTNIFNILSNKYEIDFPVCYECATLLMEELKNEYERVNADKEVYAKFLSKLRKQDAGTNMKERTAQLLEQLEKTKQEERDKEKKLQGLYDERDSLEKVLASLENEMEQLNIEEQQIFELENKYEYELMEFKNEQSRMEAMYEDGLTQLDNLRKVNVFNDAFNISHDGQFGTINGLRLGTLDSKRVSWYEINAALGQVVLLLFTLLSRLELELKHYKIFPIGSTSKIEYQVDPDSKPVTINCFSSGEQLLDKLFHSNKLDPAMNAILEITIQIADHFTKQDPTNELPYKMENETISNLNIKPSKRKSNEEWTLACKHLLTNLKWIIAFSSST

SEQ ID NO: 73 - protein, 944 aa, Saccharomyces cerevisiae
MAYADSPENAIAVIKQRTALMNRCLSQHKLMESLQHTSIMLTELRNPNLSPKKYYELYVIIFDSLTNLSTYLIENHPQNHHLADLYELVQYTGNVVPRLYLMITVGTSYLTFNEAPKKEILKDMIEMCRGVQNPIRGLFLRYYLSQRTKELLPEDDPSFNSQFIMNNFIEMNKLWVRLQHQGPLRERETRTRERKELQILVGSQLVRLSQIIDDNFQMYKQDILPTILEQVIQCRDLVSQEYLLDVICQVFADEFHLKTLDTLLQTTLHLNPDVSINKIVLTLVDRLNDYVTRQLEDDPNATSTNAYLDMDVFGTFWDYLTVLNHERPDLSLQQFIPLVESVIVLSLKWYPNNFDNLNKLFELVLQKTKDYGQKNISLESEHLFLVLLSFQNSKLQLTSSTTAPPNSPVTSKKHFIFQLISQCQAYKNILALQSISLQKKVVNEIIDILMDREVEEMADNDSESKLHPPGHSAYLVIEDKLQVQRLLSICEPLIISRSGPPANVASSDTNVDEVFFNRHDEEESWILDPIQEKLAHLIHWIMNTTSRKQTMKNKIQFSLEAQLEILLLIKSSFIKGGINVKYTFPAIITNFWKLMRKCRMIQEYLLKKRPDNKTLLSHYSNLLKQMFKFVSRCINDIFNSCNNSCTDLILKLNLQCAILADQLQLNEISYDFFSQAFTIFEESLSDSKTQLQALIYIAQSLQKTRSLYKEAYYDSLIVRCTLHGSKLLKKQDQCRAVYLCSHLWWATEISNIGEEEGITDNFYRDGKRVLECLQRSLRVADSIMDNEQSCELMVEILNRCLYYFIHGDESETHISIKYINGLIELIKTNLKSLKLEDNSASMITNSISDLHITGENNVKASSNADDGSVITDKESNVAIGSDGTYIQLNTLNGSSTLIRGVVATASGSKLLHQLKYIPIHHFRRTCEYIESQREVDDRFKVIYV

SEQ ID NO: 74 - protein, 843 aa, Pichia pastoris
MNQALDSKTLEDSLLIVKQQITLMRKCLESKNPQFMDALKHASTFLSELRTNKLSPKLYYELYVLVFDGLAYLSDFLKESHQTNHLADLYELVQYAGNIVPRLYLMITIGSVYMSIENAPKLEIMKDMLEMSAGVQDPIRGLFLRYYLSQKTKELLPTETESELKETIQFTITNFIEMNKLWVRLKHQGHSSERERRLKERKELQILVGSNLVRISQLDQIDKFYYKESILPKVLEQIVQCKDSLAQEYLLDVIIQVFPDEFHLLTLDDFLQSTLHLSEGFSMNKILVTLINRLIDFQKREPANVKVIISELSTLTLQKDEHEENHTEESDSETTKPQTSSNLFEKFYDYSHLLVENKPELNFKDLSLILEAICKLSLSYYPQDYENINKVFGFALALIHQTTQHLEIWEPLLKTPICYNFDPKLVLSLDDNYKQFASALPTAIQSANALYILEKFLEQDVRLSTVEEVKTLYELLAVWFTSEDSSDSNTNSLLFGTDSSKNEPDESPEVVSQYEALAKSIHLIHHTNPYKHFELLEIAKSFMSKSGSRVRYTYPTLLFAVIKLIRKLTIVQKLNALKLKQFCQFFSATNTELLTLVSNGTLQSEGGVLAQTCMNLNLSMALILDQSSHIDLSYEFFINSFVIYEESIVDSRLQFQCLLSIIGTLHKCRNIVNGNEDNFDALISKTALYGSKLLKKTDQCRAVYLASHLWWIIEELDEEDEIESETAKTSEDELQVVIKTDNKKVLECLQKSLRIADSCLETNVSLELFVEILSRSLYFFIHGNELITIKYLNGLIELIQNSILTIGEENTSIDTPTKHFQRTLEYIRQQAQIDSRFEEIKDR

SEQ ID NO: 75 - protein, 164 aa, Saccharomyces cerevisiae
MAEQISHKKSLRVSSLNKDRRLLLREFYNLENEPNKGRQEARIGEKASEAHSGEEQVTDVNIDTEANTEKPVKDDELSATEEDLKEGSEDAEEEIKNLPFKRLVQIHNKLLGKETETNNSIKNTIYENYYDLIKVNDLLKEITNANEDQINKLKQTVESLIKEL

SEQ ID NO: 76 - protein, 245 aa, Pichia pastoris
MNSATDSITHKKPIKIKTDISNNRRKALKEFYKLKDAKHKDTEAQPSDQTATHNTSEEVNNETLSPDTTTENEQVPALDENLTEETFDTFLKTADIGQLVNQYNVISEDLNNTKAEVKSIIYNNYYELIKINDVLENVRKLETVTTDTDSLDSKQESTLIIDSLNSIRSNIQLLKDRYKGFSITIDENEKKKSETAHDNLTRLISGDKLTDDDIHKIDEVLPKINKEALLLQLNEIKDKAGAPET

SEQ ID NO: 77 - protein, 641 aa, Saccharomyces cerevisiae
MDVLKEVLSLDQDKFDQLKETSRDKTNETDDPFENYLKDCKFKAPSNKDQSPFAKLKSLQETHSNNEAAINIIIPQLIDYLTEFTNRLSNYTQDLDFIKKKSNELQSLLEYNSTKLAHISPMVNDLMIPPELIDDIIKGKINESWQDNITFIADKEEIYNKYRSNNLDQDNKDAENSAMLAPKDFDKLCQLLDILKNVILERSKRLIISKIKTLRSHNPVPSQRIQNKLLKVQKIFPFIRDNNLSLALELRQAYCYTMKWYYREYFSRYIRSLTILQFQQIDSQFALGNGLSTTSVSGFNNSPSLFFSNYLTTSASNAFYNKLPVTDEKIDKYFQIKKRLNILTQEDNTVMVSQIAENNTTKNYIEIGFKNLNLAILDNCTVEYHFLKDFFAMNGDNFEEINGLLEQIFQPTFDEATTYTQQLIQYNYDIFGVLISIRVANQLQFESERRGIPSMFDSFLNGQLIQLWPRFQQLVDFQCESLRKAAITTNVAKYAGNSSTSNSSPLTSPHELTVQFGKFLSSFLTLAITHKQSIDERSEPLYNSIIRLRNDFETVMTKCSKKTKSPERFLATNYMYLYNNLQQLHLHLNINDSDAQNYNFDSAENVGTKVANDDDNDSSVPLIIRETENHFKTLVEAFTRN

SEQ ID NO: 78 - protein, 585 aa, Pichia pastoris
MRQKQRISRRSISRHQQFQDQDNTNKLELLKQVLNVRQEEETELNEQNGYQSDYTLSDFSVQDVYSLQELRFLTTQFSEQCKDFSMRTWKHEMAAQEDYSNILVNTKASLEPLIRYLNNFEVQLKELSLQMEFLQERSNELNQQIEQKNKINRKLAPIVNDLVIPPKVILSVLNDNIDASWTKNIIFIKEKQQLLSKYTEQDELQIKCSPMVVKVLELLKLTVVERSRDFIINQIKLLRKPNCSSQVIQKQLLDCKLIYSFLKENSPELATQLRKAYAYTMRWYYHQNFSKYLYSLERLEYRTVPRDVLLGETVDSQLHVNEYLNLGTRAELINSHSTLMPAQIAETNQLSYYIETGFNNFNGALLDNVSTEYLFLSQFFELYKFDEVNDLFKLIFQPTFTIGINYTKNLIRGTFDIYGVLLCIRLSQLYDYELQHRKIPVMDDYINLQLINLWPHFQIIIDENCESLKKAVPKLAVQLHKTKNTLIPLVLTQQFGQLIAGLLKLTTHKVFETEQTEPLTVGVSRLSNEFEAALTKLSSSFKDSNQKELFFYNNFYLVLTMLSDDGKFAHDIVNHFEKLLQAYKS

SEQ ID NO: 79 - protein, 822 aa, Saccharomyces cerevisiae
MLEGTVDYDPLEDITNILFSKESLNNIDELISITRSYKKQLQEDILKEENELKEHPKNSAEIEASLRKVFQDFKETQDVSASTELTISNLTEGISYLDIAKKNLTHSLTLFQNLKILTDSYIQCNELLSQGSFKKMVSPYKIMCSLAENTFISYKSLDEINYLLSSISRLKGDTLSKIKQNYNALFSGGNISEHDTALTMELREGACELLDCDTSTRAQMIDWCLDKLLFEMKEIFRVDDEAGSLENLSRRYIYFKKILNNFNSKFADYFLKDWEMAVRLTTTFYHITHKDLQTLLKREFKDKNPSIDLFMTALQSTLDFEKYIDVRFSKKIKEPKLSSCFEPYLTLWVSHQNQMMEKKFLSYMSEPKYPSNETESLVLPSSADLFRTYRSVLTQTLELIDNNANDSILTSLANFFSRWLQTYSQKILLPLLLPDNIEVQDKLEAAKYTVLLINTADYCATTIDQLEDKLSEFSGNREKLANSFTKTKNIYDDLLAKGTSFLLNRVIPLDLNFVWREFINNDWSNAAIEDYSRYMVTLKSVLKMPALTDASIKQQQEQPSTLAFILSQFNRDVYKWNFLDKVIDIITTNFVSNTIRLLQPVPPFSLAGSKRKFETRTVVNIGEQLLLDLELLKEIFHTLPESVSNDSDLRENTSYKRVKRHADNNIDQLLKFIKLLMAPLDSADDYYETYSKLTNNNPDSAVWSFVLALKGIPWDLALWKKLWSAYNLETDDTDEGSRPDSNRDLFIFKWDKVLLGQFENNLARMQDPNWSKFVRQDLKISPPVMKRIVSTPQIQQQKEEQKKQSLSVKDFVSHSRFFNRGT

SEQ ID NO: 80 - protein, 841 aa, Pichia pastoris
METEDYDPKIDLWKLLDTPNSLRQLDDLLNYTSGYKRVLDNSISLNITEYKGFQEMMGDETKLENLETDIVDLISSFTKTWELADDTEKAIQSMTGNIRKLDNCKRNLTLSMTVLKRLQMLIGAFYNLTDLLKNNAKNYSMIYQLLSVVLELMQHFQSYKSIDEINDLNRTISRIKNQIVDGIFSDFEDLSSNPNPELLYACKTLDSLGPAYRSKLINWYVNLQLKEVNSIFGPTEEAGSLSNLGRRFIFFKRLLMQLENQTSKVFPKDWKIELVLAQKFCEATKSDLNRVIARERASNTSGSLDTTLLMNSLEETLDFEAHLNQKFKYYDDSNIESTKAVPVFDRMISEVFEPQLQFWMDYQDSKLNERFSQFLTPDNLLKKTGPLSDDKSALDDSSINVLDSSTELFRVYRQLLVQLSKLSHGEPLLNLSNMFVKYLYQYKNQVLQPLIPPAKKISSLTTEEASQVLPHICLILNTADYCCSTISQLEERLSKLIEDPKISERMGFDPVKESYLVLINSCLNLLLLKLDRDLDMSWREFTNENWKNLTEVTGESRFLTSVKRTVMENCTVLFRNFDKERYIRNFTDRVIELIITDFTAQIVKIIPIHEIVAEQLLLDLQSLRSLFLDIPNLSPKQTELTNTKPIVSSRMFKKFVDTNVNNLERILKMVMTRTKPFDNFVQSYFMVIGDKKFDNFFKILILNGTISLPRGFSNAASHHASLQNERLKYQDIFNQQLLAYEDGDTEQEQLEESFAFLDNFDIDPKTISNFFNNIGHSNTDSIDDQFIDSGINSLAKKIDKQAIINTKENLEKNLARTFSGDHKLNINENFKNFSKLFGKKN

SEQ ID NO: 81 - protein, 889 aa, Saccharomyces cerevisiae
MSISETPHNKSQGLQKAAGRPKIVVPEGSPSRNSDSGSFTIEGDTSLNDDLLSISGSVTPRARRSSRLSLDSITPRRSFDSRTLSVANSRSFGFENETHSGSMDFSPLGNNSIYEIVMNTRRKNWLNYPTVADIPQVSLSKNDLDDHWKTHVIEYVKNIKSDYQIFQSTNNIRNMNQMEQLKELREGENMHEESFEANLRQGDAELINSIPDFYFSDKFQLDNPRTFHKVLDAIDLFLTKLDMKRQAERDEAFSELRDRLNDFLDIVETLLVTEISKSSHKFFHALSEVDNIQKRALDTMSELKELAQNIKTIDAENIRKKISHLEMIFKRKNVEKLEQGLLQAKLVLNKTDECKSMYEENKLDNCLELIKSIDYLIKGDDSINEDVQSWTRCWPYKLSNLRTIPALSATREFLTNMKIEIGGKFSLQLSILLIDDLRSFCKSIKPKETLHRIQTGSNDKKQTIFTDNFSSKITELIVRLNRCEELTSAFDLYREKSITELKSIIKIYLPTENAHADNNHDEKHLNNGSTSGSKLSRLIKEQTPAEFQSMLVNIFTHALEALRRLYGHQKLLLDISLNELASVKSPNENQHNMITQLDIRTGINEIIRIIQLRTGKIIAVRRELNLSLRYDYFLKFYAICVIFIQECEVLSGEFLTKYLSNVLASQIKHYANAQSSKNYRNIKKKIDAEEWIPYIVDSSIQSDVNDIVSSIDIDPLSWTTILDMVGGSHDCENGRSEDKEKDEGNETYQGHRKSVVVGDKTFVASSSLLATIEVIKELMVLSINLPSIYLSNFEKLCYDALQYYNSSAMASVTQPGNSLLKTGRNLSIMGESLDCLAEFVIIVQRFYQRLSNSNRDFEPFDASHYTTLLGQFQASSNKIYMANAPPPPV

SEQ ID NO: 82 - protein, 1358 aa, Pichia pastoris
MDTSIDRRDESFSESPSLNDDLLPSSSAVNTPTHRRLLSSSTLSSFRPSFDDSSISLGINRLSSQSISPLGQNSIYELVQGAERSKRHLRTISVNGGTTTVHLKGPSINDIPAVKLPKITKANPNSYKPYLESLKDYFNEYESNNQLTEKTLETYLKQVDEEDQLANDIHQSAADASLQDIPSVYFQEDFRLDNPRVFETVVEGSHISLQDGSSKSLANNNLLQEKLSWYLDTVEVHLINEISKSSGSFFTALDDLNKITTGSKVTAKGLLALQERVDLLDEQQAKKAINILQKIQKRINTEILEQSLLQVQTILQQADLAEATYLNGNYEKALDQIDSIRCLIKGDTSKSLLAQSVVSKWPYPLQNLTELPALSSLKHLLKNLESEIGRTYCKMFVDFLIEDLRNHYDHVSKHDTLYRLSSNLQRDNRRFTYIKLDKEINNSFQDVNALFKEKLSHFMKELSRCGELTNAFGRYEQQLLVEVKSIVRSFLPEEDSRTSSHASQTNSTQSNARNSLSDNLRLMTPREFEDMLIEIYCRVSEALRRLTIHQKALLDMSLDFVTESDFANTSQTDIIMTLDITKSILTTIDVVQTRVSKVIGVRREQTAQISLDYFLRFYSVNGLFLYECEMINGGNTNTTALQDAIGVQTKLFNTAFHSSTLKLISESIEKEPWKSGYLPNEFQTLLNQVIQSANEDPEKWINSLKFQYENNVQSDPEDIQGEERKTLSIDQDSFIVPTVVFTILRCVKNYEMLKLVFPQHTLLYYSNVCEFLRLMNVKIQQSVLKAGATRTAGLKHITSKHLVICSQLLRFIVHLIPHVKNCFLRSVKQEDKLQVAEELDKIKDLFFDHENEIFAKLVSIMTDRFGTHSAEIKRIDWSQNVQSGQCHRYMEILVKETLTICNVLQTYLPENQYTSILSGIFDNYKRLLLAEYTQVHFKDSIEKAIMMRDVDYFRAKLGDVVGYNDSGQVIWEKINSMPTDEDERMAIVMNGNIAQERKSVEVARSSLESYRAATPGKWFGRGKEEKIESKKPKDSKINPKEREIVEVEQDSKEQKKEETKELPKGETKEEAIEKPKAEKDEEVIEKQKEEKEEETRENSKEKKVNDSSPQMVAVEYSTGSETEKVTETKAHDTSSTIQEEEDEKVEKKTQENGEESEPQRNNSQNTQVPTADDQIQDRVDMETETIQENGDDTSSVDEDHNQKTDILDENGSGTSNIDSEVPEPPSLQSRPLDSEFQELNKNGKLEKLGSKQTGLIQETNTAPEEGKTVLPELDDEKDISDIQDTSEQADKQTFLETSEKAPQETSDANDQRSSVELTKEVEIAQDQTVASSETEGIKQNSSPKKKTKPKSRKKKGRR

SEQ ID NO: 83 - protein, 704 aa, Saccharomyces cerevisiae
MRLHYITVFDPSRSTNENDTFKQLLLFHYFGTTDSIPSLNEKLSIIGVIQGIWSLTSSCVNKDGEDLEKIIELNNDIIFCIKVESRFFISLAISNISDDQSAIPLQYLSAYLWLSYRFFKLLNGSFSGFNKDFRKLTDLLNEFVIPFWNDIYLNLETVTNRSFTVMWPGFYKRANFQHSSYNPGEKNNVEESWDAIILQNILLDKKSYLGLKDILVYHLPKRTKAANRESMGTKTYGLVRNFTSDLNTLPDISNWLYHLHCTYGEISSHILTGNVHFKEELQVEEEQERSRDTNGRDEEESQEQQRREHQETTQNNTSELSLSERVIHNVTLPISFAYDAIHEVSTTTGVSGSLSMIMDYVPKPHWPFISSSNKSADKNNYSNSNDNANSNAPLMAQSEAVGGTIGNSRFGFLISPLNSDLLPSSYQALKLNLNFENSKDKEDFYNCLFWYFDDFLIVIVCDPDFNKICERDYLKDLSFQLCQSMECLNNEILNSQNCDNVESFAYVIRDNVTKEIDSSVPFGSPKFTSDESISTLQLAINGIDQFINDNSNSLSLANWNPITIMGGSNAISKKNTTEGFGNGVNDKTQKFKRKYLNFLNLMSAEKLWDLQVDVLQFLTSLQNSKRDPDYFQEERLLKLNNGVLCYIKENNSNLIIIIKNWFQNNGTSKAAKQRNRFSSDSSKGSSLFQSLGRDVTDWWESREI

SEQ ID NO: 84 - protein, 656 aa, Pichia pastoris
MESAGQQLVLQSYPGLQFFAIFNPKLQSNEESIPSSDLDETELEVKRKLLCFIRFDGAETSNFQKFKLIGMIEGLQDFSSKFRGGNKLRFIDTQKTRLILLNVEQDYWLVLSIRLAEVKVTATNEKIFTLRFLALPEYTEAELQEGYRWWRLHNGEFSFNYNQLPLESFTQLLEDWWYTWCKNKWVNFEIKNEGFVDVDHSFRKSSIELPNGFTDSLETNLAELMSEDPEILDIIIMNTTKTPIKNFGVLWKNKDSKFEQESIVDLIRYQQCIALTVGLTTNNLSEGNVLSPSEVDPTSPEEERENLFYLIANQSLSFLEPSKNFLTTQLGNILYPATMTLDAMSSISGYLPEVSWFYNKGETPPTLEAPQANDDAENTPDAKVNEKRGKFLIGMVKLHTNTDEKEICDKLVFLKQKDEPTYMEHKLLIYEVAGLTFTAIYRGDCASLNEPEYYRKLEDSLYRIWQTCLYRLVLENIKEYQSCVKSKPSTFYYLLYDRPSDSHQSSFPVISFRGSDEDFGELDSDVFSTLTLKDNETIKGSILNSTSKPKNAKEISKSQLISLNQSILSLSTESRSEQEILLPDEKLLKTGRNWWVLFKDLGESQAYGTSLIIAKKFDSKDPSKKDIFNNSDSDDNLVSSLGEDVSEWWEQFTRSV

SEQ ID NO: 85 - protein, 2278 aa, Saccharomyces cerevisiae
MSSEEPHASISFPDGSHVRSSSTGTSSVNTIDATLSRPNYIKKPSLHIMSTSTTSTTTDLVTNPILSNISVPKISPPTSSSIATATSTSHVTGTASHSNIKANANTSTSVNKKNLPPTTSGRIPSSTIKRYPSRYKPSHSLQLPIKNDSNFKRSSIYASKSTVTAIPIRNNRPISMQNSYARTPDSDHDDVGDEVSSIKSASSSLTASLSKSFLFAFYNNRKKDKTSNNGVLSKEYWMKDESSKECFSCGKTFNTFRRKHHCRICGQIFCSSCTLLIDGDRFGCHAKMRVCYNCYEHADTYEDSSDEENDSTMQLNEPRSRSRSRSSNTNPYSHSHSHLHLISQDNHNGTDLHDPVAATDNPQQQNEVYLLNDDDVQSIMTSGEDSKLFISTPPPPPKMAIPATKQGGSLEISFDSENDRALHYQDDNPGRHHHLDSVPTRYTIRDMDNISHYDTNSNSTLRPHYNTNNSTITINNLNNTTSNNSNYNNTNSNSNINNPAHSLRRSIFHYVSSNSVNKDSNNSSATPASSAQSSSILDPANRIIGNYAHRNYKFKFNYNSKGPSQQNDTANGNNDNNNNNNNNNNNNNNNSASGIADNNNIPSNDNGTTFTLDKKKRNPLTKSKSTSAYLEYPLNEEDSSEDEGSMSIYSVLNDDHKTDNPIRSMRNSTKSFQRAQASLQRMRFRRKSKSKHFPNNSKSSIYRDLNFLTNSTPNLLSVVSDDNLYDDSSPLQDKASSSAASRLTDRKFSNSSGSNNNSNSNSNINTDPWKRIASISGFKLKKEKKRELNEVSLLHMHALLKQLLNDQEISNLQEWITLLDGALRKVLRTILNARDLNTLDFRQTYVKIKRISGGSPQNSEYIDGVVFSKALPSKTMPRHLKNPRILLIMFPLEYQKNNNHFLSIESVFRQEREYLDKLVSRLKSLHPDIIYVGANVSGYALELLNDSGIVVQFNMKPQVIERIAKLTEADIAISVDKLATNIKMGECETFEVKSYIYGNISKTYTFLRGCNPELGGTILLRGDSLENLRKIKQVSEFMVYAIFSLKLESSFFNDNFIQLSTDVYLKRAESKKLQVFEGYFADFLIKFNNRILTVSPTVDFPIPFLLEKARGLEKKLIERINQYESESDLDRQTQLNMLQGLESTITKKHLGNLIKFLHEMEIENLELEFQKRSRQWEVSYSSSQNLLGTGSHQSITVLYSMVSTKTATPCVGPQIVTIDYFWDSDISIGQFIENVVGTARYPCQQGCNGLYLDHYRSYVHGSGKVDVLIEKFQTRLPKLKDIILTWSYCKKCGTSTPILQISEKTWNHSFGKYLEVMFWSYKDSVTGIGKCPHDFTKDHVKYFGYNDLVVRLEYSDLEVHELITPPRKIKWKPHIDIKLKVELYYKILEKINNFYGSVLSRLERIKLDSMTKDKVLSGQAKIIELKSNATEEQKLMLQDLDTFYADSPCDQHLPLNLVIKSLYDKAVNWNSTFAIFAKSYLPSETDISRITAKQLKKLFYDSSRKDSEDKKSLHDEKAKTRKPEKNELPLEGLKDVEKPKIDSKNTTENRDRTNEPQNAVTITTFKDDTPIIPTSGTSHLTVTPSASSVSSSLTPQTEERPPISRSGTGISMTHDKSTRPNIRKMSSDSSLCGLASLANEYSKNNKVSKLATFFDQMHFDALSKEFELERERERLQLNKDKYQAIRLQTSTPIVEIYKNVKDAVDEPLHSRSSGNNLSSANVKTLEAPVGEHSRANNCNPPNLDQNLETELENSISQWGENILNPSGKTTASTHLNSKPVVKETSENPKSIVRESDNSKSEPLPPVITTTTVNKVESTPQPEKSLLMKTLSNFWADRSAYLWKPLVYPTCPSEHIFTDSDVIIREDEPSSLIAFCLSTSDYRNKMMNLNVQQQQQQQTAEAAPAKTGGNSGGTTQTGDPSVNISPSVSTTSHNKGRDSEISSLVTTKEGLLNTPPIEGARDRTPQESQTHSQANLDTLQELEKIMTKKTATHLRYQFEEGLTVMSCKIFFTEHFDVFRKICDCQENFIQSLSRCVKWDSNGGKSGSGFLKTLDDRFIIKELSHAELEAFIKFAPSYFEYMAQAMFHDLPTTLAKVFGFYQIQVKSSISSSKSYKMDVIIMENLFYEKKTTRIFDLKGSMRNRHVEQTGKANEVLLDENMVEYIYESPIHVREYDKKLLRASVWNDTLFLAKMNVMDYSLVIGIDNEGYTLTVGIIDFIRTFTWDKKLESWVKEKGLVGGASVIKQPTVVTPRQYKKRFREAMERYILMVPDPWYWEGN

SEQ ID NO: 86 - protein, 1656 aa, Pichia pastoris
MSENVLGSGITKEYWLENSSAKKCCLCEKRFTTFRRKHHCRICGKIFCSGCTLFISGEKFHINARIRVCQLCVNVADRLEDDMSTDDDSIPEESLRPIRTRTRTNSTHKYDIDQSPRVSLEGEPPQPPPMMAIPATRTGEAVEIPTSRRLDSRSRRNTNEHSASFSVDDRNKPKSSFSFNFNFNFNSQNNPESTEKNQSVLEDDQSNISDLLGTFHRSHVFGNSDSENENERSMSLYTALNSDQGIQGSYKYDLNSEKNLRTPIKMETTPSERRVQRVEGSMDNDLVSLPDSRIIDTKNYTSLNRVKNRMRPKKSRMNQRARFRNTENPVNKNFNLICEAHGKKLLQQILTVNSVSNTELWEKKLLEILQSIEGINLDISNGYDLHRNFKVKRIYGAKVEDSQLLNGVVFSKILPLKSMSRKISFPKICLIMFPVAYASEGFTSLEPMIAQEEEYTRKLVDRIIAMNPDIVLIGASISGLALKMLDDASITVASDIKPQIIERLSKMTNADIVSSIDKLALKPRLGMCGLFEERTYLHDSIVKTYFYFTECESNTGCTILINDDPNVKASLTSLIYVFFNLNLEKKVLEHQFLQTYDSQDSEYSGSDSFRYNTSLIGNEAYEFLPPSYESFLNKYRETIFSSSPGVMRPLPSLLINVRKLLKQLSELSKLFIDFKNECSSKGSSKLAVTKKYMSLLNFNIHADIEPNRLYEIAVYQLEFQREHLRHLLNSQQRQWELFCAHSTLMLEFNHHQSIVFLYNLVSTKNATPCVGPEVLEINFYLENDISLGQYIEHVSHNAANACSEGCGLQLMDHFRSYVHDRGKLDVVVEPFACKIPGLQNTLLMWSYCKICRTNTPVVLMSDQAWKYSFGKYLELSFYSKKTSVIGSCTHDFYKDHIRYFGLNDLAVRIEYSTVDTLDLVVPKFTMHWNPEFDINLKHDTLQHTLTRARAFFNSVQERLDRVKVDSMTIDKMQEGQKKILQLKDKLLQQSTKIENEAMELYNTTKVDEHLCLNGIVRKVQDLSVGWDSEFQSFEANYLPSEKDVSRITSYYLRKLFSDKEPEESSEKSKKQEHDENPKESQRESEETGSSKMPIGTLELEAELKRGRSFSNKDTASPREVPGDSPPGSNTPIGRVQRLANMFNELPFDEISMEFEKQREREKQKIKTYRAIPVISSNPRVAIYKNAIEALEDGLVNPSRRIPLVHSSSFEGKGVSNSSPNLSSKERPKAREDLLVKLDEEITPTEKVPLIKTLSNFWADRSAALWKPLAYPLKSSEHVFVDSDVLVREDEPSSLIAFCLSTSDYNDKLRSVKEARGVVPSSNDDGFSVHSSAKDGSILSNQVGGPADKGNISKTGISELERIMLKKTAIHLKYQFQEGPSLLSCKIFFAEQFDAFRTQCGCDDKFIQSLSRCVKWVSTGGKSGSAFLKTLDDRFIIKQLTTSELDSFVNFAPSYFEYFSQALFHDLPTVLAKVFGFYTIQIKNTVTNKNLQMAVLIMENLFYGRKTSRIFDLKGSMRNRHVEQTGKENEVLLDENMVEYIYESPLFIDEHAKKLLRASLWNDTLFLAKMNVMDYSLVIGIDSDRHELVVGIIDCIRTFTWDKKLESWVKEKGLVGGGGGAPTKEPTVVTPKQYKNRFREAMERYILMVPDCWYQGT

SEQ ID NO: 87 - protein, 452 aa, Saccharomyces cerevisiae
MSSSAIKIRNALLKATDPKLRSDNWQYILDVCDLVKEDPEDNGQEVMSLIEKRLEQQDANVILRTLSLTVSLAENCGSRLRQEISSKNFTSLLYALIESHSVHITLKKAVTDVVKQLSDSFKDDPSLRAMGDLYDKIKRKAPYLVQPNVPEKHNMSTQADNSDDEELQKALKMSLFEYEKQKKLQEQEKESAEVLPQQQQQHQQQNQAPAHKIPAQTVVRRVRALYDLTTNEPDELSFRKGDVITVLEQVYRDWWKGALRGNMGIFPLNYVTPIVEPSKEEIEKEKNKEAIVFSQKTTIDQLHNSLNAASKTGNSNEVLQDPHIGDMYGSVTPLRPQVTRMLGKYAKEKEDMLSLRQVLANAERSYNQLMDRAANAHISPPVPGPALYAGMTHANNTPVMPPQRQSYQSNEYSPYPSNLPIQHPTNSANNTPQYGYDLGYSVVSQPPPGYEQ

SEQ ID NO: 88 - protein, 475 aa, Pichia pastoris
MPYRASGSISNFELIEESDKRDYTTTVAAAPFQLVLSFWVTMPSKLESCIIKATDEKLTSDNWGYIIEVCDTINDEPETGPATAIIYINKRLSIKDANVLLRSLSLIIAMAENCGSRMKQAIATKGFISTFVKLIEDSRIHHTIKLKIANMLHQLSESFIDDPSLAIIDKTCSRLRSQYPDLFAPAPSKPSKREISQDDRQREQEMLDRALKLSLEEYNRTESPPLKKNETLKSNPEFVTVDNSYKWSSADSHQKLDEKVDSHPKFKSSSVTSVEDNEPLSEIVNTGSIAKVAKVRALYDLVSNEAGELSFHRGDIITVLASVYKDWWKGSLKGKVGIFPLNYVTPIKELTVHEAMEEAAKEYRIWKQSRQIDLFLNKLTEVHALVTNTGNYDALNDLLEDETISKLYNSLTPLRPQLTRLIEKYSNRKEEMLSLNDKLIKSERLYSNLLEASVSRFKSAHDSAYSNDDPRQAYS

SEQ ID NO: 89 - protein, 381 aa, Saccharomyces cerevisiae
MLKRSSLIYLSCVLIITIPILLHVYNGPGLSHEANEHRASHKQKRTLANPDKPKSENDEDLFCAVTNPVTGSYIDLSQLSSTPNKLREGQKQISGNNKHESSKTKWSVRGWGYDTNFTLGICSSPVGEAESQQLSNLTGAFYVDQLNENNLVSIGDFSTRPALVGGSTAKKLTLKYENGSMCPNGKDKKATLLNFVCDKEIQSKAQISYIGNLHNCSYFFEVRSIHACPTSNKKNEVNVLGIFIGIFAIFFLVEFAGRRWIYAKLNRHLKNDDELHDISPSLNEQPHWDLIEDGSRWSKFFNGIIKTTRRFTKSLMRSLVRGRNSRQGGIRLRSSPSASSSSLANREFFRDMEAQNEIIDSLDINSHTTESDHPTLADNSV

SEQ ID NO: 90 - protein, 283 aa, Saccharomyces cerevisiae
MSFFDIEAQSSKGNSQQEPQFSTNQKTKELSNLIETFAEQSRVLEKECTKIGSKRDSKELRYKIETELIPNCTSVRDKIESNILIHQNGKLSADFKNLKTKYQSLQQSYNQRKSLFPLKTPISPGTSKERKDIHPRTEAVRQDPESSYISIKVNEQSPLLHNEGQHQLQLQEEQEQQQQGLSQEELDFQTIIHQERSQQIGRIHTAVQEVNAIFHQLGSLVKEQGEQVTTIDENISHLHDNMQNANKQLTRADQHQRDRNKCGKVTLIIIIVVCMVVLLAVLS

SEQ ID NO: 91 - protein, 283 aa, Pichia pastoris
MSFANFDAGAQKNKVRIKEADTERANSDSDLLRQTSLILSSFVEDVSMFGKLQQQLGTKRDNERLRGQIESSISKCDLQETRLRQVTSELESNSYQNDSPNVKYKENKLLNEASRILKNYQSLKIAYDEKISSIKVREAFEQNTRQANEAALEQEQHNLETETTPLISNQIQKIDDKHQSALNQAEVSYHSVLINQRSEAIQDIHTGVGEINAIFKDLGTLVQQQGQNIDTIEVNMMSHANNNQEATHELIKADNYQKKKRKWSCALLLALVIVLVLVLAIIS

SEQ ID NO: 92 - protein, 232 aa, Saccharomyces cerevisiae
MSLFEWVFGKNVTPQERLKKNQRALERTQRELEREKRKLELQDKKLVSEIKKSAKNGQVAAAKVQAKDLVRTRNYIQKFDNMKAQLQAISLRIQAVRSSDQMTRSMSEATGLLAGMNRTMNLPQLQRISMEFEKQSDLMGQRQEFMDEAIDNVMGDEVDEDEEADEIVNKVLDEIGVDLNSQLQSTPQNLVSNAPIAETAMGIPEPIGAGSEFHGNPDDDLQARLNTLKKQT

SEQ ID NO: 93 - protein, 217 aa, Pichia pastoris
MFEWMFGKKQTPQERLRKNQRALEKTQRELDRERLKLEQQERKLIGEIKKSGRNGQMRACKIQAKDLIRTKKNIQKFAKMKVQLQAISLRIQTVRSNEQMTQSMRNAAQLLGTMNKSMNLPQIAHISQEFSRQTDIMSQREEMMDDSLDDLMDEELDDEDEEEVDEIISKVLDEIGVDLSNNLIDVPGEVVTEGQTGARVAVKEDDDLQARLDDLRR

SEQ ID NO: 94 - protein, 1011 aa, Saccharomyces cerevisiae
MVKKKTNNDKGKEVKENEGKLDIDSESSPHERENDKKKTEDDSLRATESEETNTHNANPNETVRADKFSQEESRPIEDSPHTDKNTAQESCQPSSAEDNVINTDITSLNEKTSTNDEQEKGLPLKISEGPFTISTLLDNVPSDLIYTCCEAYENHIFLGTTTGDLLHYFELERGNYMLVSQTKFDAESNSKIDKILLLPKVEGALILCDNELVLFILPEFAPRPNTTRLKGISDVVICNFSRSSKAYRIYAFHAEGVRLLKISADSLVLTKAFNFKLIDKACAHEETLMVSKLNSYELINLKSSQVIPLFRISETDEDLEPIITSFNEQSEFLVCSGGGSYDSGAMALVVNHHGDIIKGTIVLKNYPRNVIVEFPYIIAESAFQSVDIYSALPSEKSQLLQSITTSGSDLKISKSDNVFTNTNNSEEFKEKIFNKLRLEPLTHSDNKFRIERERAFVEESYEEKTSLIVYNNLGIHLLVPTPMVLRFTSCEESEIDNIEDQLKKLAKKDLTKFEHIEAKYLMSLLLFLMTLHYDHIEDEVMKKWCDFSDKVDIRILFYMFGWKVYSEIWCFHGLINIVERLKSLKLTNKCENILKMLLMMKNELKKKNKTGLLTNDFDDIMKTIDITLFKLRLEKKETITVDMFERESYDEIIREINLHDDKLPRIELLIEIYKEKGEYLKALNLLREAGDYISLVSFIEENLKKLPEDYIKERIADDLLLTLKQGDENTEECAIKKVLKILDMACINKNDFLNKIPAEETSLKVSFIEQLGVQNSNDSKFLFNYYLAKLREIINQSNIWSILGDFIKEYKDDFAYDKTDITNFIHIKLKHSLQCENFSKYYEKCENLKSENEKDDEFINFTFDEISKIDKEHILTLLFFPNELTNWVSSEELLKIYLSFNDFRSVEKYIGKQNLVAVMKQYLDISSLNYSVELVTNLLQRNFELLDDTDIQLKILETIPSVFPVQTISELLLKVLIKYQEKKEESNLRKCLLKNQISISDELSRNFDSQG

SEQ ID NO: 95 - protein, 1200 aa, Pichia pastoris
MIEGIRHQEGLVGPEQPPEQSPEQSPGGPDVSEVVKVSPSPLDISSQNRVNPLENSANEEGKKSQQDLEEDSVDKKIETREEFLEDDNNRQIEQPAIPKITDEFTTARDVQEIPLGTPEFQEDQIDERYPENHEPNDSEQQELKELHQNNSQEYLKPDDYLAPQQSQESRHVRSSSGSPQLGNQEPRVSPGPFILSSVVKDIPIQNSGILGSNDATITCIEAWDQNLYIGTSVGEILHMFKLDDETGYILISRQSFHTSKVKPIKKILLLPSIDRALVHCGSLVSIFMLPEFSPASVGKIKDVTDVSLDYDSLSIDRVRGNLVHSSQTKSPDFVQVSVFTSKFLRLVNVFKESIKLHKDISYANAITGLIRSHFALISNGIEYDLLDVNNLFKVKLFPVSSGPSPSKIKPLIAPVSQNEFLLSCGTKQDEPAMGMVVDTDGNISRGTIPWNTYPSSLNVDYPFSIGGFSNYIYVHSLHNQQEVQSMKFSHRVKISQVSHLFYTNFKDLKDLVTKIPVNPQSTPAELERITVENDLATKYSQVPSSTVVYSTYEGVKLLQQIPRLMQFMENFTLTQEYTANELSTFIDDIQDEMNVLNKSSGSNTHFESIEWQFLNDLCQLLFIESGQYQQLLDYSISAFEGDPRVLVNIFQGSDDIIGESIWMFQGLIPKMNQVSDKHINQLSEGTEAYSFFESYLLKWFSKKSFRHDYDKASMIETLEIALMKLYLLNNRVTSENFSKVQKSLIKNVQRVSAKLEQLLIDGNHWTLLIKYYQRSNENLAALSVWRNLIKGDYKDEIYNELKMQFSIDQFIKYFISQITDETVLWDYGNWLLGYSPSAALRLFSSKDLRISVPEIKVLHLIDQMSSNKVQTKFEYLDILVNERHELQFLGDYLLELLPPFLLKLQDQNGRLDELVKMYQDLKTPKLVFTTFLRLQAAKPEYKEILATYHTFSKYLSQITRNTASLSNRKTLNVVNECFKLLEPYENQIPYLIAMIESKRDDHEKVIDILLNLTDFHTAEEYAVSFRLAGTFPDTEEGHTSQLEAVQNLVVESDNLFEQDTDISADENTNVHDLLLMSIFDRYLILNDSQLIEHFLNKYNIFKTEQLDGNSDMLPALVQLDNFNGLLNKIPDNLRIQQINSFLLGNLLSIEDSYNDVLMRKNLTKGKLSAIENLYRDILNSGEEPDNSEESKGRNGHIPEL

SEQ ID NO: 96 - protein, 437 aa, Saccharomyces cerevisiae
MSTGDFLTKGIELVQKAIDLDTATQYEEAYTAYYNGLDYLMLALKYEKNPKSKDLIRAKFTEYLNRAEQLKKHLESEEANAAKKSPSAGSGSNGGNKKISQEEGEDNGGEDNKKLRGALSSAILSEKPNVKWEDVAGLEGAKEALKEAVILPVKFPHLFKGNRKPTSGILLYGPPGTGKSYLAKAVATEANSTFFSVSSSDLVSKWMGESEKLVKQLFAMARENKPSIIFIDEVDALTGTRGEGESEASRRIKTELLVQMNGVGNDSQGVLVLGATNIPWQLDSAIRRRFERRIYIPLPDLAARTTMFEINVGDTPCVLTKEDYRTLGAMTEGYSGSDIAVVVKDALMQPIRKIQSATHFKDVSTEDDETRKLTPCSPGDDGAIEMSWTDIEADELKEPDLTIKDFLKAIKSTRPTVNEDDLLKQEQFTRDFGQEGN

SEQ ID NO: 97 - protein, 426 aa, Pichia pastoris
MSDFLNKGIDLVQKAIEADTATKYDEAYKLYYNGLDYLMLAIKYEKNPKSKQLIRNKFTEYLSRAEELKEHLDKQEQTTQSGENSATNGSVKAKKAGGGPDGDDDDNKKLRGALSSSILSEKPDVKWSDIAGLEAAKDALKEAVILPVKFPHLFTGKRKPTSGILLYGPPGTGKSYLAKAVATEANSTFFSVSSSDLVSKWMGESERLVKQLFNMARENKPSIIFIDEVDALCGPRGENESDASRRIKTELLVQMNGVGNDSDGVLVLGATNIPWQLDAAIRRRFEKRIYIALPEPEARVEMFKLNIGNTACELDNEDYRTLASITDGYSGHDVAVVVRDALMQPIRKIQSATHFKPTEDGKYTPCSPGDEGAVEMSWMDLETEQLQEPELTMKDFIKAVKNNRPTVNKQDLARFEEFTNDFGSEG

SEQ ID NO: 98 - protein, 1029 aa, Saccharomyces cerevisiae
MSLSSWRQFQLFENIPIRDPNFGGDSLLYSDPTLCAATIVDPQTLIIAVNSNIIKVVKLNQSQVIHEFQSFPHDFQITFLKVINGEFLVALAESIGKPSLIRVYKLEKLPNREQLYHSQVELKNGNNTYPISVVSISNDLSCIVVGFINGKIILIRGDISRDRGSQQRIIYEDPSKEPITALFLNNDATACFAATTSRILLFNTTGRNRGRPSLVLNSKNGLDLNCGSFNPATNEFICCLSNFIEFFSSSGKKHQFAFDLSLRKRIFCVDKDHILIVTEETGVPTTSISVNELSPTIINRIFIIDAKNKIISLNFVVSSAIIDIFSTSQSGKNITYLLTSEGVMHRITPKSLENQINIIIQKELYPFALQLAKQHSLSPLDVQEIHKKYGDYLFKKGLRKEATDQYIQCLDVVETSEIISKFGVKEVPDPESMRNLADYLWSLIKNSISQRDHVTLLLIVLIKLKDVEGIDTFIQHFDRKGIWNEGVVMDDMDDVTFFYSDNDFFDLDLILELMKESDFKRLSYRLAKKYSKDSLIIVDILLNLLHNPVKAIKYIKSLPIDETLRCLVTYSKKLLEESPNETNALLIEVFTGKFKPSTFEVDLDRRDTTGDFSENIRTVFYSYKTFFNYMNSNGTSDAMSESSEASHEHEEPTYHPPKPSIVFSSFVTKPFEFVVFLEACLACYQQYEGFDEDRQVILTTLYDLYLNLAQNDVPERIDDWRSRATGVLRESNKLVYSAASNNTSKRVDNSIMLLISHMDQSSASAKDKTKIDIASFANDNPEMDLLSTFRAMTLNEEPSTCLKFLEKYGTEEPKLLQVALSYFVSNKLIFKEMGGNEVLKEKVLRPIIEGERMPLLDIIKALSRTNVAHFGLIQDIIIDHVKTEDTEIKRNEKLIESYDKELKEKNKKLKNTINSDQPLHVPLKNQTCFMCRLTLDIPVVFFKCGHIYHQHCLNEEEDTLESERKLFKCPKCLVDLETSNKLFEAQHEVVEKNDLLNFALNSEEGSRDRFKVITEFLGRGAISYSDITI

SEQ ID NO: 99 - protein, 942 aa, Pichia pastoris
MSLSSWRQFSFFELTPIKDPNLGSEKSLYSDPSLTSVCASPEYLIIATAFNKVQLITKDYIKKFDFTAYELGWNIVHLVYLTDSHFLCTIAERQGFPLTLKLWNLKKLMAMEKSDESLEFEFHSSCQIANGNNNFPMTAFTHCNNFSILCFGFSNGSVILVRGDLLHDKGTRQRLVFESNEPVTNLLFKDENSLYLTTTSKIYTIPTTGKNQGKPDKIIDRGVGVDIGCCTLDHKRHLVVGNDSMLQCYSTRGKSNAIALDISKKKLFAFGKYILIISNDHKLLIIDVINMFIALNENIETAISNIFLLWDDVYMLGSDGVLYRIHELDQKAQLDIVVSRNLYDIAIRLAQSMTGIEESDILTVHRKYGDYLYEQQSYGEAMTEYIKCLALGKTSEIIAKYKDSSKISRLALYLEAMVEEGQARKDHITLLLCSYCKLKQIDKLLEFPQKHPDVEFDLFTLIDLCRESDYLEVASTIAKQFNEPSIVVDIELNDLNKTKSTLAYLRTLQIEDLLRVLLDHLKPFLTRLPHPTTKLLIEVFTGKFKPTPVSQEEKISEPEEKQFPVLQSYQAFVSYMASLTETSTSENEQKDDISPTYLPPRPSIIFSSFIDHPNEFIIFLEACLESHDYYGGNDQDRSDILTTLYEVYLTMAQEEPDQKSEWEEKALTLIKNNKAKMNETSIILISNLYGFNAGEMLVRDQQVGFEIDLFRSAMSNGDLQSIQSILQEYAEEQPELYRLGLSYYISDPDISKSRESGAFKNLDTITTRNLMTPLQIVQKLGENSIATVGIVKEYLLRYVTAMRTEILNNEKLIDHYSKQIERDNAQVEDLKHNPVTLQNTRCHSCSLPLDLPIIYFLCHHSYHERCLNDSEYENSKHLRSELECPKCAEKTDTITALRKEQEEVSQRNDLFAVALENSSDRFKTITGFFAKGSIFDGVNYLN

SEQ ID NO: 100 - protein, 3144 aa, Saccharomyces cerevisiae
MLESLAANLLNRLLGSYVENFDPNQLNVGIWSGDVKLKNLKLRKDCLDSLNLPIDVKSGILGDLVLTVPWSSLKNKPVKIIIEDCYLLCSPRSEDHENDEEMIKRAFRLKMRKVSEWELTNQARILSTQSENKTSSSSSEKNNAGFMQSLTTKIIDNLQVTIKNIHLRYEDMDGIFTTGPSSVGLTLNELSAVSTDSNWAPSFIDITQNITHKLLTLNSLCLYWNTDSPPLISDDDQDRSLENFVRGFKDMIASKNSTAPKHQYILKPVSGLGKLSINKLGSTEEQPHIDLQMFYDEFGLELDDTEYNDILHVLSSIQLRQITKKFKKARPSFAVSENPTEWFKYIAACVINEIHEKNKMWTWESMKEKCEQRRLYTKLWVEKLKLKNLEAPLRDPIQEAQLSELHKDLTYDEIILFRSVAKRQYAQYKLGMTEDSPTPTASSNIEPQTSNKSATKNNGSWLSSWWNGKPTEEVDEDLIMTEEQRQELYDAIEFDENEDKGPVLQVPRERVELRVTSLLKKGSFTIRKKKQNLNLGSIIFENCKVDFAQRPDSFLSSFQLNKFSLEDGSPNALYKHIISVRNSSKDQSSIDNHATGEEEEEDEPLLRASFELNPLDGLADSNLNIKLLGMTVFYHVHFITEVHKFFKASNQHMETIGNIVNAAEATVEGWTTQTRMGIESLLEDHKTVNVSLDLQAPLIILPLDPHDWDTPCAIIDAGHMSILSDLVPKEKIKEIKELSPEEYDKIDGNEINRLMFDRFQILSQDTQIFVGPDIQSTIGKINTASSTNDFRILDKMKLELTVDLSILPKAYKLPTIRVFGHLPRLSLSINDIQYKTIMNLIANSIPSMIDDEENNGDYVNYSSGSEKEMKKQIQLQLKNTLKALENMQPLQIEQKFLELHFDIDQAKIAFFQCIKNDSRNSEKLVDILCQRLNFNFDKRAKEMNLDLRVHSLDVEDYIELTDNKEFKNLISSGVEKVTRSQKDLFTLKYKRVQRIVPHNDTLIELFDQDIVMHMSELQLVLTPRSVLTLMNYAMLTFTDPNAPEMPADVLRHNKEDRDDAPQKINMKIKMEAVNVIFNDDSIKLATLVLSAGEFTMVLLPERYNINLKLGGLELTDETNESFSRDSVFRKIIQMKGQELVELSYESFDPATNTKDYDSFLKYSTGSMHVNFIESAVNRMVNFFAKFQKSKVSFDRARLAAYNQAPSIDAVNNMKMDIVIKAPIIQFPKLVGTQENNYDTMRFYLGEFFIENKFSVIDESHKINHIKLGVREGQLSSNLNFDGSSQQLYLVENIGLLFNIDRDPLPQDDTPELKVTSNFESFALDLTENQLTYLLEISNKVSSAFNITDENSGESGGKGEIKSPSPDPASLSSESERTATPQSLQGSNKSNIKNPEQKYLDFSFKAPKIALTLYNKTKGVTSLNDCGLTRIMFQDIGCSLGLKNDGTVDGQAHVAAFRIEDVRNIKDNKHTELIPKSKNKEYQFVANISRKNLEVGRLLNISMTMDSPKMILAMDYLVSLKEFFDAIMSKSHENNLYYPENTNQKPENKAIVESVQEGGDVTKIQYSVNIIETALILLADPCDMNSEAISFKIGQFLVTDQNIMTVAANNVGIFLFKMNSSEEKLRLLDDFSSSLTIDKRNSTPQTLMTNIQLSVQPLLMRISLRDIRLAMLIFKRVTTLLNKMTEKEDNGEEEESTDKIQFSHEFERKLAVLDPSILGERSRASQSSDSESIEVPTAILKNETFNADLGGLRFILIGDVHEMPILDMNVNEITASAKDWSTDFEALASLETYVNIFNYSRSSWEPLLEMIPITFHLSKGHSEMDPAFSFDILTQRIAEITLSARSIAMLSHIPASLTEELPLASRVSQKPYQLVNDTELDFDVWIQDKTTEDNKNEVVLLKANTSLPWEFEDWRSIREKLDIDKSKNILGVCVSGQNYKTIMNIDATTEGENLHVLSPPRNNVHNRIVCEARCDENNVKIITFRSTLVIENTTSTEIELLVDSKDPNKPSLKYAIKPHQSKSVPVEYAYDSDIRIRPASEDIYDWSQQTLSWKSLLSNQMSIFCSSKEDSNQRFHFEIGAKYDEREPLAKIFPHMKIVVSASMTIENLLPADINFSIFDKREEKRTDFLKTGESMEVHHISLDSFLLMSVQPLQDEASASKPSIVNTPHKSPLNPEDSLSLTLSGGQNLLLKLDYKNIDGTRSKVIRIYSPYIIMNSTDRELYIQSSLLNIAQSKILLENEKRYTIPKMFSFDKEDDKSNRARIRFKESEWSSKLSFDAIGQSFDASVRIKNKEQESNLGINISEGKGKYLLSKVIEIAPRYIISNTLDIPIEVCETGSMDVQQIESNITKPLYRMRNIVDKQLVLKFLGGDSNWSQPFFIKNVGVTYLKVLKNSRHKLLKIEILLDKATIFIRIKDGGDRWPFSIRNFSDHDFIFYQRDPRKVSDPYKDDQSNESSSRSFKPIFYRIPSKSIMPYAWDFPTAKEKYLVLESGTRTREVRLAEIGELPPLRLDKRSKDKPAPIVGLHVVADDDMQALVIVNYKANVGLYKLKTASATTTSSVSVNSSVTDGFVQKDEDEKVNTQIVVSFKGVGISLINGRLQELLYINMRGIELRYNESKAYQTFSWKMKWMQIDNQLFSGNYSNILYPTEIPYTEKEIENHPVISGSISKVNDSLQAVPYFKHVTLLIQEFSIQLDEDMLYAMMDFIKFPGSPWIMDSRDYKYDEEIQLPDVSELKTAGDIYFEIFHIQPTVLHLSFIRSDEISPGLAEETEESFSSSLYYVHMFAMTLGNINEAPVKVNSLFMDNVRVPLPILMDHIERHYTTQFVYQIHKILGSADCFGNPVGLFNTISSGVWDLFYEPYQGYMMNDRPQEIGIHLAKGGLSFAKKTVFGLSDSMSKFTGSMAKGLSVTQDLEFQRVRRLQQRINKNNRNALANSAQSFASTLGSGLSGIALDPYKAMQKEGAAGFLKGLGKGIVGLPTKTAIGFLDLTSNLSQGVKSTTTVLDMQKGCRVRLPRYVDHDQIIKPYDLREAQGQYWLKTVNGGVFMNDEYLSHVILPGKELAVIVSMQHIAEVQMATQELMWSTGYPSIQGITLERSGLQIKLKSQSEYFIPISDPEERRSLYRNIAIAVREYNKYCEAIL

SEQ ID NO: 101 - protein, 3128 aa, Pichia pastoris
MLESLAANILNRFIGAYIENFDNNKLNIGIWSGDVKLRDLRLRKESLDELRLPIDVQFGHLGELTLQIPWSNLKSKPVKIVIDSVYLLATPNDPSKFDPEEQERRAQKLKQDKLDQLEMLANSKPMKSDEDERELDQQGIEKNESFVESLLTKITDNVQVTIKNIHVRYEDFDVFTNRPYSVGFTLGELSAVSTDSNWVPNFISSITLYTHKLLTLDSFALYWNTETTSISDPDPEVLLGRFKESLDNRSDHQYILEPVSGLGHVTLNKVGTTETAPHVALKLFFEEFGVNLDGDQYRDFLWTASQYHLYLKTRKFRKLRPKCTVKEDPLKWMQYTAKCILQEVHEKNRKWSWKYFESRRDQRKLYIKLWKEKLEGKQLIDDKLEQFEKLEYELSYPDIRFYRSLARREFRKEKATSPSNTLSNQTEKNTSGGWLSMIWGPSKKDTQVDESKDQLELTEEQRKELYDVIDFDEKQAITEAVEIPKDRVKLEVSSVLQKGFLAIKRTQTSKNLCEVVFEGCYSEFFQRPDSFLARFQLDELRVEDGTENTLYKHIVNVKPLGDPEVVAHTPEGKREPFFQLAFENNPLDGSADSSLTARMKSMTIFHNPKLIEDVARFFTPPKIHLETVGAIINAAESTLEDFTMQTRIGLQYALEEHKTINLKLNMQSPLIIIPLDPSSWKSPVAVLDAGHISVTSDLVDPSKYQEVTDKVSKQYDDNDWKTLKDLMYDKFTLKIQDAQVLVGQNIKSTISQLHGNSSNVSATILDNLNMNFSLGVSIAQSVISLPRFKIGGDVPRFRVALNNFQYKVIMQLLENAIPDLDNISEDAETTKENGFSVANNNESTEKFSYEVPDDVSSAGSDDKPTVSTQKLFVFNFTLDTIEVSLLRCDDASTFVSETLIRIIGKKVQLDLFKTSKQLHVDLSLLDINVEDFIEQSGENEFKYLLSSDNFEEHEVVNKRGNLFTLSYDKTQRIVPLNGEQIICFDQDIDLNIADVKFVITRRSILTLLNYALNTFTDVNPPETPADQLRHNDDTEQMLAPETINVRIKMDSIIAVLNDDGIKLATTKLSEADIGIVVFPERLKVSAKIGGLSLFDEVNEGVSRSSVLRNLISFEGNDLAELEYETFDPAINSKEYSATLKLRTGSMKIVFVEGPFNNIIKFLSQFQRMKYIYDNARDAALNQASSIDNSTKILFDVLIKAPTVVLPKAIDPTNDRFETITAFLGELYASNKFIEERSNVVQLIDLGIRSTKVTSKFYTKDQREQLFEIIDKLELKLHLNYCDEYIKERPICVVNGGLEGSEMNLTELQCRYIMELMAVIPKVFQFDSDYEDENFEALRNDAENMNKEIRGTNVERVEEEQPKSAEKEVIPSDHTKLDFTFDVAQIALTIYDHTDMVTSLDKSSLSQISLNDTHLLFTLKENNDFSSELRTRSFIVEDSREIKDNKFTKILSTAQDSDYQFMASAFSKAGSKSATLAIDSPKTILALDYLVALKSFVDTGFISSANPALQNVQLSTMSNESPEEEESESVSVESQDQLAVKQDENEEAFKFTINVVDVSVILLADPSLDTTEAIVFNVEQMLFDSHRTQSLSLKNIGMFLCRMDQFDTNRLRILDNFSTSLTVDDRNSSELNRLTSIKLHIDPLLLRLSVRDIRLAISIVNKAIDLMGQQDKEPDKSTTAPGVQYISFTKEFKRKLSQYAPTIISTISQTSVRSYKVKNKAQVVVRDESLVANFEGLRCVLIGDVYELPVLDMNVKPFDVVAKNWSTDLEAFSNLESFVNIFNYSSSAWEPLIEPWPLGFHVKKSRKLAKGDSDKFVVNISSTDKAEITMTSRSLALLNQVATFLTDDIPLQPRGENSPYRILNHTGYNIKVWIEGSESNRLTSIANGDEVSWVFEDWRTLRESLSVDSMKGFIGIELEDSPYEKLQQVSLQTIGEEIFTLQPARGNFHNRLVVTITLGEDSVKHVVIRSTVKVTNTTQVKIRIGLNSDPKSSVPQKSFTINPDETYAIPIDNVLNDSIFVKPEGLDSSFGWSSNSTTWKTLRNETVSFACTEEEGKERANFYFQAYAIVNENYALAKVYPQMEIVISPPLELINLLPYDLSYRIYDKSSKKDWRNFLKQGNSSAVHVVKLDHFLLLSLKPLDCGIDKSDFCIINSPKNSDFKPETRVTTRGTDGQRLHLNLHYSKIHSDYAGVKITIFSPYVVLNRTSEDLFLSEGYNTMKSFVSDSQTDKHRLVKKALPKMFSFDRDNWNGNRATIRLSDSEVSRKVGLDTVGQSVNVDVPCNTRGYEKNLSVTIGEGSGKYWLSKVVTVAPRYIFTNKIESTVILQEYGTGKQLKVRPGSSIPLYNLRTGRKKQLTLGLDDGSTQLSSPFNINDIGEIYLKILKHNNDYILTKINILLENGSLFITIIDANGKWPFSMRNFSDSEFIFYQSNPMINEEGILEDPSYRFKPIYYRLPPKSVMPYTWDYPAGSMKELIIRSHNAERHVQLQEIGSLKPMVLPATSTEEKSIVDLNVVADGPTQSLVISNYDSSKSMYKLHSKSESSTTVADKFETIDSENDYFFQLIVNLEGAGFSFINNRQQELCYLTLRSLEVRYNESDIYQNLSFKLKWFQLDNQLYGGIYPIVLYPSVLPNSNKDINNHPAWSASISKVKDESHGVTLIKYATILLQEFTLEIDEDFLFAVLDALKVPGKAKVEDKLCDNDLDLPTLDKNVSDSDIYFEALHFQPMQMNLSFVRTEHINADEVSNSDNALSFFLNILTMAIGNINYAPVRLNALLIENVRVPVPLLLQLIQTHYGQAFLYQVYKILGSADFLGNPVGLFNNLSSGFLDIFYEPYMGFVMNDRPQELGIGLAKGSLSFVKKSVFGLSDSFAKFTGSMAKGLTAATLDTSFQERRRLNQRRNKSKHGFLGFSAGASSLFESVSSGITGLTDAPSQGAATDGASGFLKGIGKGLIGLPTKTAIGFFDLASNVGEGIRSTTTAFDGEGIEKVRLPRFVAQNSPISPYSERDAQGQFWLKSANGGQFFNDKYLTHAVLPGGEYVVVISYTHIILVSIADLSVSRSIEMKQIKSILVDSTGLQIKLTERDSKSEATEMFIPLPEQKTRREVYQKLSIAVQDFNKRCQVIL

SEQ ID NO: 102 - protein, 798 aa, Saccharomyces cerevisiae
MKNPSFDWERLKDVFYRSRAIGELKWPTQYEEFKCALSLTVIAVEIQDFIQVYNYFGQLLGKINLQRIHEDIIKFEFDKDEKLILVTKSSIKIVKGWSPLTIESVPLQDPTIDTIWDYHNGIMLLAKSRDIYKLNGNEWELLYENKDKKYNLLTKNHWSCNDDSIILLDVDHVYQVSTSNGALLKLITDSSWHKVTISSRGFICLYNMKDNKLQIFRDPARILMEHNLDSTPDDICWCGNDTVACSFEDEIKLYGPDGLYVTFWYPFTVTNLRAEVDGLKVITTEKIYFLSRVQPQTSNIFRIGSTEPGAMLVDSFSLLEDHAPKAIEILKNFVLEKGVLDCIAAAIDEFEPKLQKMLLNAASYGKASLQYKSFDASIFVNACNTIKLLNCFRSFGIFLTVEEYRCISLKGVIDRLLKYHRYYECIQICKLANERFLLGYVFTEWAKDKIKGSPDMEDDELLDKIKSRLSVIDMTDTLQMVAVAKVAYLEGRFQLSRNLALLEKNEEARIEQLYNLDDDSIALKECIKVQNYSLTISLLIALSKKLTNSQLTKLLIIDMFNNPLYLYYMRMDKAYLYDFYRQTDRFIDLAHVLLQQGKEQQSLHSFLPQIKDLYSQVQNSEVVNNTIEQLQRQEKLWIYQESLGKRFAISFTNMTLDQTLSKLIETGQDKQVKEIVKKFKISEKKLYHLKCKTLVEAKKFDELLQFAQSRKSPIGYMPFYTYLKSRGHMDKASPYVNMIPGLSYQEKKKLYVECRGFRDAIQLAGKEKDIPGLKEIYNIIPPNEPELKALANETMSRI

SEQ ID NO: 103 - protein, 566 aa, Pichia pastoris
MQWCSNDAVVLATNDELQVIGPGDDSISFYYENRPFIRSQNDGLTVLTQSKLEFLSRVANFTEETFRIGSTKASAILLDSIDQLDRHSPKADENLRIVKPNLVEAVDNCIRSASEEFDPQWQKKLLRAASFGKSILDFYSSEEFVEICNNLRVLNAVRQPEVGMFITYAQLLNYGHQGLIQSLIRRRLFLLASKICKFLSLFPDNIYFAWAKLKIKSSYNTNDKELSEIILDKLAETKRVSYTGLSEVAYNEGRVELAHLLLDHEPVLENQVPLLLQMGQDKNALLKSEQSGNVDLICSVLLRLYYKFSLSQFFILLSDSTDVSIGIFKDIIGSVKPDLLLEYYYQDDQLIKIAESNLLQDSTYSLDAETKRNRLLELLKAYEGKKFYENDVPIIESHLKLLNYQETLTNKFNHSFVAFSKIETISELARLDDEKLTETQKYAYQFGISSTQLYHSVVKSLAKSHQWDKLFQFAKSKKSPVGYELFFRECYLQNEKRQAGLYIGMCKELTYKARADLYLKIGEYRLAADEASKKKDIDLLQLVKDTAGSTNVGITRLIEDYVTRIG

SEQ ID NO: 104 - protein, 918 aa, Saccharomyces cerevisiae
MIKTRIEEVQLQFLTGNTELTHLKVSNDQLIVTTQRTIYRINLQDPAIVNHFDCPLSKELETIMNVHVSPMGSVILIRTNFGRYMLLKDGEFTQLNKIKNLDLSSLHWINETTFLMGIKKTPKLYRVELTGKDITTKLWYENKKLSGGIDGIAYWEGSLLLTIKDNILYWRDVTNMKFPLVLPDESEQFERLKHHAIKKFDSYNGLFAWVTSNGIVFGDLKEKQMEKDPASNNFGKFLSSSKVLLNFELPDYQNDKDHLIKDIVLTAFHILLLRKNTVTMVSQLNNDVVFHETIPRHQLTGSNTDSNEKFLGLVRDSVKETFWCFSNINVFEIIIENEPNSVWNLLVRDNKFDKALSLKGLTVREIESVKLSKAMYLFHTAKDFHSAAQTLGSMKDLSHFGEIALNFLQIKDYNDLNVILIKQLDNVPWKSTQVVLSSWIIWNFMKQLNDIELKINTTKPASTDEDNLLNWNLNLKEKSNELTKFLESHLEKLDNETVYQIMSKQNRQNELLIFASLINDMKFLLSFWIDQGNWYESLKILLTINNHDLVYKYSLILLLNSPEATVSTWMKIKDLDPNKLIPTILKFFTNWQNNSKLITNISEYPENYSLTYLKWCVREVPKMCNPIVYNSILYMMITDPRNDMILENDIIKFMKSNENKYDLNFQLRLSLKFKKTKTSIFLLTRLNLFEDAIDLALKNNLIDDCKVIVNDEILIEDYKLRKRLWLKIAKHLLLSMKDIDIKQLIRTILNDSNEILTIKDLLPFFNEYTTIANLKEELIKFLENHNMKMNEISEDIINSKNLKVEINTEISKFNEIYRILEPGKSCDECGKFLQIKKFIVFPCGHCFHWNCIIRVILNSNDYNLRQKTENFLKAKSKHNLNDLENIIVEKCGLCSDININKIDQPISIDETELAKWNE

SEQ ID NO: 105 - protein, 891 aa, Pichia pastoris
MDLSIEEVQLEFHIKGKTVDLQVNSNILDLVLENGTIYTIDLSRPENVSTIQLPISAGTQVVGSFSDYKGCHLIVKTKSLDYFYVNRKSKSAISLKKLKNLDLIGIKFSDELVGHSTTGPFLVFDEQNVYETCINLNSNKIERYFKNVHHDKSIVDVFWTLKNAVDLDIIIFTKTGISTYKDKLEKIHHNSSNFVSVFKKNIGFEELSIRKVYTDDKTYAILTDLGFQLENVKVSLPSNVKASDIKSFSLTKYHVLVMTKHNDIILINSLNSTISARQSAPEAVRLSTDSYSSSYWQFNEDSIYEIIINNEAKDIWRILLAQKKFDEALDMVSNDKLNRDLILIEKGKNHLELKKYSEGAKILAMTSYNFETITLQLLELKEYDSLLLYLTTKLESFPTKKFQMQKVILSCSCIKLLIQMLSDKSLSEEESKNIHTKFQSFVNKFKDSLDKETVYQLLIPHNLNEDLLYFANLIKDYDFVLGYYVGLSKWKDAIKIIAIQNDPVIVYKYATVLLLNEPNETINTWMKMIENLDIHKLIPSLLTYNRSVSKRIDISNNQAIRFLSYFIRFTGSPDNVVHNTFLTMIISYPNSDETLSLKYLEDNVHPDGKISIYFDADLILRLCNRFKRIESMVQLYSMLDQYQNAIQLALDNDLLWKSTQIAEKQDIDDKLRKKLWLQISRKMIFNIISNRKFQTDLITYDTDEIGEKIKKTLSFLLGKCDMLTIKDLLPLFPDFVVIDNFKKEIVQSLEDYSKEMKLLSQEMDESADISETIKKELAEFKNDSFQIIEPKESCSVCNRILITRKFMIFPCGHSFHQDCLVASILESNDYKLKSQISSIEKRMSSKRESRAELREEIDKLLSGKCCLCSDLKINSIEDPFISVSDKDDWQL

SEQ ID NO: 106 - protein, 221 aa, Saccharomyces cerevisiae
MGQKSSKVHITKTDRAILEVKRSKDEIHKFTRRTDNLILVEKSQLKDLIRKNPENYKSNMKVRFLLKRIHYQEHLLQQASDQLINLENMVSTLEFKMVEKQFINGLKNGNEILKKLNKEFSNVDELMDDVQDQIAYQNEINETLSRSLVGTSNYEDDLDKELDALESELNPEKMNNAKVANMPSTEGLPSLPQGEQTEQKEREEFATEERSDTKEPLALLS

SEQ ID NO: 107 - protein, 204 aa, Pichia pastoris
MGNSGSKGLSEQDKAILQLKLQRDNLHKAQTRINLVIEKENQVARQLLRNGQKERAKLALRKKRYQESLIKQVFGQMDTLEQLISTIEFKLIEKDVLYGLQEGNKVLGQLNNEMSLDKVDKILDESDEAIRYQEEITDLLGTRMNQADETAVEEELEALERETKKTVVLPDVPTVRVGVEDDKETRNEQKEDKPLQTQKTPVAA

SEQ ID NO: 108 - protein, 233 aa, Saccharomyces cerevisiae
MKQFGLAAFDELKDGKYNDVNKTILEKQSVELRDQLMVFQERLVEFAKKHNSELQASPEFRSKFMHMCSSIGIDPLSLFDRDKHLFTVNDFYYEVCLKVIEICRQTKDMNGGVISFQELEKVHFRKLNVGLDDLEKSIDMLKSLECFEIFQIRGKKFLRSVPNELTSDQTKILEICSILGYSSISLLKANLGWEAVRSKSALDEMVANGLLWIDYQGGAEALYWDPSWITRQL

SEQ ID NO: 109 - protein, 258 aa, Pichia pastoris
MKRLGLSALDNVQNHNQRYQEVGKKLLEDQTNQLQTQLTVFQNGLISFIKEHKKDIEDDPKFRTEFSQICLNFGVDPLAAFSIAYNGEGGQSTEKSKQKVVKNDSTANQSEQDFYNDLGIKIMEICQDTADINGGVISIKEILQILSNKPLTKLFGIQLTQDDIVKSINALTEALGTELQIITIGHKLYCKSVPQELNKDNSTVLETCGNIGFVTVSLLIDNFRWKKARATTVLEDMVANGLLWIDEQASEIQYWELS

SEQ ID NO: 110 - protein, 385 aa, Saccharomyces cerevisiae
MSANGKISVPEAVVNWLFKVIQPIYNDGRTTFHDSLALLDNFHSLRPRTRVFTHSDGTPQLLLSIYGTISTGEDGSSPHSIPVIMWVPSMYPVKPPFISINLENFDMNTISSSLPIQEYIDSNGWIALPILHCWDPAAMNLIMVVQELMSLLHEPPQDQAPSLPPKPNTQLQQEQNTPPLPPKPKSPHLKPPLPPPPPPQPASNALDLMDMDNTDISPTNHHEMLQNLQTVVNELYREDVDYVADKILTRQTVMQESIARFHEIIAIDKNHLRAVEQAIEQTMHSLNAQIDVLTANRAKVQQFSSTSHVDDEDVNSIAVAKTDGLNQLYNLVAQDYALTDTIECLSRMLHRGTIPLDTFVKQGRELARQQFLVRWHIQRITSPLS

SEQ ID NO: 111 - protein, 431 aa, Pichia pastoris
MGLPESLLRWLFQVLKPQYHNPVLCYQDVSLILMKYSSLKPRTRVFADNKGQDQLLLSLYGSIPCKHHNVTYEIPITIWIPLDYPNSHPTIYVTPSNETHVLNPNNYVDANGKVYHPFISQWHSVYGADKYNDPKKVQENRLLKLVEVIGDAFGREFPLFKRHAPPPIPGYDNPRQSPRLPTNEVNPMNSPRSEVLASSQPPPLPTKPKEYQSPPPDSSRPLNFNTSSHSTPSQQSLSSPQPGATVPYVYKDMLSSNFDQSHKGDEQHSLLTSLHKSLSVLLEQDLKLLYNEDILPQLQRIEKELLALKDLASKDDQLVKYYQTQIKKNKQILESKISEASYMIKNLSNDKSVDKIDEILVAETVVFNQLYDLRTEEASINDTIDIITKSHDSGSIDTDLFLKYTRQLSREKFMVIALTKKIITSIGIENK

SEQ ID NO: 112 - protein, 224 aa, Saccharomyces cerevisiae
MDYIKKAIWGPDPKEQQRRIRSVLRKNGRNIEKSLRELTVLQNKTQQLIKKSAKKNDVRTVRLYAKELYQINKQYDRMYTSRAQLDSVRMKIDEAIRMNTLSNQMADSAGLMREVNSLVRLPQLRNTMIELEKELMKSGIISEMVDDTMESVGDVGEEMDEAVDEEVNKIVEQYTNEKFKNVDQVPTVELAANEEEQEIPDEKVDEEADRMVNEMRERLRALQN

SEQ ID NO: 113 - protein, 225 aa, Pichia pastoris
MDYVKKAIWGPDPKEQVRKCQQLVRKNKRQLDRYINDLRMVQKKTQSMIKKAAKSGDKNAVRLYARELVNINKQSDRLHVNRATIDSIGMKLQEQQQMLKIQGSLSKSTEIMREVNSLVSLPQLRNSAQELERELMKSGIINEMVDDLVDEVDEDEELMEEEEVQAINEIIEQYTSDAVGKLPETGGTPIEVASPKVPEKEEEEVSEDNEEVLNAMRERLKALQD

SEQ ID NO: 114 - protein, 202 aa, Saccharomyces cerevisiae
MSALPPVYSFPPLYTRQPNSLTRRQQISTWIDIISQYCKTKKIWYMSVDGTVINDNELDSGSTDNDDSKKISKNLFNNEDIQRSVSQVFIDEIWSQMTKEGKCLPIDQSGRRSSNTTTTRYFILWKSLDSWASLILQWFEDSGKLNQVITLYELSEGDETVNWEFHRMPESLLYYCLKPLCDRNRATMLKDENDKVIAIKVV

SEQ ID NO: 115 - protein, 186 aa, Pichia pastoris
MSSFEFPSIYNFPPFFTKQPNNSVWKSQLQQWTTLVLDYCKHYRIWRLSTAGTPIVEDATGVPSDSLFTNSIIDRHLKPEVCQEIIASLVDQGRAQWIDKTAQKSVLVLWYSISEWSDLLLNWVDSTGQKGVVLTLYEIQHGNLTLSEEFHSIDETTLTQALELLEKKGKVLMMKENKNVVGVKFI

SEQ ID NO: 116 - protein, 622 aa, Saccharomyces cerevisiae
MSVSTPSELDALIEQATSESIPNGDLDLPIALEISDVLRSRRVNPKDSMRCIKKRILNTADNPNTQLSSWKLTNICVKNGGTPFIKEICSREFMDTMEHVILREDSNEELSELVKTILYELYVAFKNDSQLNYVAKVYDKLISRGIKFPEKLTLSNSPTAMFDSKTPADWIDSDACMICSKKFSLLNRKHHCRSCGGVFCQEHSSNSIPLPDLGIYEPVRVCDSCFEDYDLKRHDDSKKSKKHRHKRKKDRDYSTPEDEEELIRKAIELSLKESRNSASSEPIVPVVESKNEVKRQEIEEEEDPDLKAAIQESLREAEEAKLRSERQKASRQMQPQQPSPQPQPIHSVDLSDEEKDSIYMFASLVEKMKSRPLNEILEDSKLQNLAQRVFASKARLNYALNDKAQKYNTLIEMNGKISEIMNIYDRLLEQQLQSINLSQQYTLPQVPSDPYNYLTENVQNPAESYQTPPLQQLSSHQYKPQQDVSRQQSVKANSSPTTNIDHLKTIDVTPHAQQKPQSHVELAPSDPPYPKEEAEDEGTQAVQDEESSTQESRERPYPVETENGETSINKRPQGITRYDFPTVPARKFVQPESTVPLPASSSEIPIKEERPPSPQEELLIEL

SEQ ID NO: 117 - protein, 747 aa, Pichia pastoris
MSWFSGKNSVPLENKINEATSEFIPDGEIDLEVSLEITDIIRSKQVTPRDAMRALKRRFMGSNNPNIQKSSIKLIDFCIKNGGIHFVQEISTKEFLDPIVLKLHDKSLNSEVKALILDSIQNWSILFSTNPKLEYVTTIYNKLQDEKIFEFPSIYHTETIGASFIESEVAPEWMDSDACMICSDLFTMINRKHHCRSCGGVFCGQHSAKRCKLPKLGITLPVRVCDNCYDQHKSRKQRHKNSNSVTTAAAPSDADMDADLKLAIELSLKDSGGSQYPVPVAGPKVSSTVKVDDDDEEMKAAIEASLKDLKQSQPSNPHTQTEDETPNYYANLLPTASVDTTPISNQQPEVVTYRPANEIPISEEEKRFRQNEVTGGEVADIHLFSTLVERLREQPTGSVLQDQELQDLHSKVTLMRPKLNKSVADSVQKYDQFVDMYSKIDTITRLYDELLEIRLAHVTGRPLHPQSTGRSSIHYRQPGSRFSSIDHSSQHPLQDPTHHIQQPYYEPSNDSQHPPALALSSEPPGDLKYPSEPAQYQVSPPSRRQSYQSHSSYPAPPQLAKIDSGVPQHASNSVYPAPPLLARIDSTLSRDTSHSNYPPEQLPYPQPGYPSYQQNVPMYEGSPKDTRSPAEFSPEYSNIPESAETPLGYPQPPYEAHPEPYSPQYSYDKYDQREVQRHDSVRYNPAPSYPNSGYSYPRADQNQNQNQHQINAVNREQATTWPQVPQNSPPPVPTVEAKEPDAPLIEL

SEQ ID NO: 118 - protein, 242 aa, Saccharomyces cerevisiae
MQKHNIKLNQNQDISQLFHDEVPLFDNSITSKDKEVIETLSEIYSIVITLDHVEKAYLKDSIDDTQYTNTVDKLLKQFKVYLNSQNKEEINKHFQSIEAFCDTYNITASNAITRLERGIPITAEHAISTTTSAPSGDNKQSSSSDKKFNAKYVAEATGNFITVMDALKLNYNAKDQLHPLLAELLISINRVTRDDFENRSKLIDWIVRINKLSIGDTLTETQIRELLFDLELAYKSFYALLD

SEQ ID NO: 119 - protein, 255 aa, Pichia pastoris
MNNQSPYAPTNIHSERSVSLGLVRNSSISLDVPFKLYENSKEQHLYEALSELYSIIVTLNSLERAFIKDTLYDNYEARVNRLISQYNAILKQEEVLSLFGSLEQFTTTYQLDAPYAKNRLEVGLPLQEPQLTYNGTGNVSITGTADLGAGAGAGTGSNYSSRAVAEATGNFITCMDAIKLHYRTKEQLHPLFSDLIMSINKVLNNGEFEGKAKIVEWLIKLNGLGIDESISEQESKTLLFDLDNSYKGFYSKLDS

SEQ ID NO: 120 - protein, 844 aa, Saccharomyces cerevisiae
MKPYLFDLKLKDTEKLDWKKGLSSYLKKSYGSSQWRTFYDEKATSELDHLRNNANGELAPSSLSEQNLKYYSFLEHLYFRLGSKGSRLKMDFTWYDAEYSSAQKGLKYTQHTLAFEKSCTLFNIAVIFTQIARENINEDYKNSIANLTKAFSCFEYLSENFLNSPSVDLQSENTRFLANICHAEAQELFVLKLLNDQISSKQYTLISKLSRATCNLFQKCHDFMKEIDDDVAIYGEPKWKTTVTCKLHFYKSLSAYYHGLHLEEENRVGEAIAFLDFSMQQLISSLPFKTWLVEFIDFDGFKETLEKKQKELIKDNDFIYHESVPAVVQVDSIKALDAIKSPTWEKILEPYMQDVANKCDSLYRGIIPLDVYEKESIYSEEKATLLRKQVEETETANLEYSSFIEFTNLPRLLSDLEKQFSDGNIFSNTDTQGQLMRDQIQTWCKFIQTNEFRDIEEQMNKIVFKRKQILEILSALPNDQKENVTKLKSSLVAASNSDEKLFACVKPHIVEINLLNDNGKIWKKFDEFNRNTPPQPSLLDIDDTKNDKILELLKQVKGHAEDLRTLKEERSRNLSELRDEINNDDITKLLIINKGKSDVELKDLFEVELEKFEPLSTRIEATIYKQSSMIDDIKAKLDEIFHLSNFKDKSSGEEKFLEDRKNFFDKLQEAVKSFSIFASDLPKGIEFYDSLFNMSRDLAERVRVAKQTEDSTANSPAPPLPPLDSKASVVGGPPLLPQKSAAFQSLSRQGLNLGDQFQNLKISAGSDLPQGPGIPPRTYEASPYAATPTMAAPPVPPKQSQEDMYDLRRRKAVENEERELQENPTSFYNRPSVFDENMYSKYSS

SEQ ID NO: 121 - protein, 804 aa, Pichia pastoris
MDKDPGSYNSSIKLVPNPQLMKTPLITLPLKKTKDDTDWKSALDSHIKLAYGANHEFSNEIDTFSAIRSDIHNLKPDVLGRDILYKYYGQLELLGLRIPIKHLNVSFTWYDAFKTSSKVKQHSTAFEKASVLFNLAATFSELGKSSLSEGNFKASYTNFQYSAGILQFIAENFLHAPSGDLDPEVVTTFQKVMIAQAQEIFLLKMFDDDSANVKHSLAAKLAKAASNMYESITEPLKGFLSKGVPITFSQLTAYKAIYYDALAHYHNALHNKATSKYGAAIADLKEAESQLKECENTFLPSDFKQIGDFQSELSELIKIELPSIEKDNEFVFNDHVPSTAPIIKPLEGARPISLADQDFSATVGKDLFEKIIPMSVHEQSSLYSEMQAQLLREEGSNVELLDEELSSLMSYLNLPKSILELKELLEIKPDELRLDFSDSTQELDPRILSAALEIQDSSYVTEAQAVRRIKEELLSKLNNTQNLLLNEERNYSENKLRYGAKWTQQPSTMLNSSYKQNLTRTRKSLEDASLSDKKLESMISPYQYVLNILSGGPHSSELRNAFNPSLPDSEVSLLDIDDRSFNTKAKIGQLDSKVQELHNLRKERANTYNDLKTAVRKDDISSIILINKDNPNMEENVFRKELLKFQPYRNRIEATGERQNLLMQEIKVLMSEVLNDPTIKKNRLSKHSQKETQSKQLNNYLDAYKQWKTYVTGLKQANSFYKQLFNLVNEQHNSVVNYTNQRQMEANALGQDSLSYGLGSLNLEGTSQPPPRPPKDSDQDPYKNPSVFDPLLYASFSDNNQSRR

SEQ ID NO: 122 - protein, 240 aa, Saccharomyces cerevisiae
MWSSLFGWTSSNAKNKESPTKAIVRLREHINLLSKKQSHLRTQITNQENEARIFLTKGNKVMAKNALKKKKTIEQLLSKVEGTMESMEQQLFSIESANLNLETMRAMQEGAKAMKTIHSGLDIDKVDETMDEIREQVELGDEISDAISRPLITGANEVDEDELDEELDMLAQENANQETSKIVNNNVNAAPISENKVSLPSVPSNKIKQSENSVKDGEEEEDEEDEDEKALRELQAEMGL

SEQ ID NO: 123 - protein, 232 aa, Pichia pastoris
MFNYLFGGNNQLKKEAPKKAIVGLREHIALLNKKQQHLQNQMEEQDKLARASITKNKTAAKTALKKKKTYEVQLVKILAQIDSLETQLTSIENANLNLETMKAMKQGAKAMKQIHGDFDVDKVDSTMDEIREQVELGEEISDAISRPLGTQEVDEDELEDELEELQQEELNSKLLGTGSEPIKDPITHKMPDVSRLPQVWSKSENQVLQGEGEIEDEDEAALRALQEEMGMV

SEQ ID NO: 124 - protein, 691 aa, Saccharomyces cerevisiae
MNRFWNTKKFSLTNADGLCATLNEISQNDEVLVVQPSVLPVLNSLLTFQDLTQSTPVRKITLLDDQLSDDLPSALGSVPQMDLIFLIDVRTSLRLPPQLLDAAQKHNLSSLHIIYCRWKPSFQNTLEDTEQWQKDGFDLNSKKTHFPNVIESQLKELSNEYTLYPWDLLPFPQIDENVLLTHSLYNMENVNMYYPNLRSLQSATESILVDDMVNSLQSLIFETNSIITNVVSIGNLSKRCSHLLKKRIDEHQTENDLFIKGTLYGERTNCGLEMDLIILERNTDPITPLLTQLTYAGILDDLYEFNSGIKIKEKDMNFNYKEDKIWNDLKFLNFGSIGPQLNKLAKELQTQYDTRHKAESVHEIKEFVDSLGSLQQRQAFLKNHTTLSSDVLKVVETEEYGSFNKILELELEILMGNTLNNDIEDIILELQYQYEVDQKKILRLICLLSLCKNSLREKDYEYLRTFMIDSWGIEKCFQLESLAELGFFTSKTGKTDLHITTSKSTRLQKEYRYISQWFNTVPIEDEHAADKITNENDDFSEATFAYSGVVPLTMRLVQMLYDRSILFHNYSSQQPFILSREPRVSQTEDLIEQLYGDSHAIEESIWVPGTITKKINASIKSNNRRSIDGSNGTFHAAEDIALVVFLGGVTMGEIAIMKHLQKILGKKGINKRFIIIADGLINGTRIMNSIS

SEQ ID NO: 125 - protein, 663 aa, Pichia pastoris
MIDLSSVDSKPVDDLFAIFDEINRKLNIQCDHLLILEKKLSQPINFLTPFSALQKVTRITKVIWLENLTDETLHAALNEFNSVVFFCEDSLQNVGRVAKLFRSTILPITETNSMMNTSLITLGSLNQSIRLYLSELSLENDIDYYSWDSILFRIDKDLLSLNSSSDLKKLYQLQSIEPLYALANGLLHLVIHSNFKLRFTNKFIKGANSAKFYDIYQKLYTNYTLNKLSPEKRKILEDVDETLFMDIHSFYNNQCDLFVFERSVDFITPLLTQLTYCGLVHDNFNVEYNTVNLKSETIPLNDELYQEIKDLNFTVVGSLLNSKAKSLQESFEERHKAKDIAQIKDFVSNLTNLTKEQQSLKNHTNLAEAVLAKVHDETGNSENHSEDSLFNQFLELQQDILSNKLDNKTTYKSIQTFFCKYNPPPLLPLRLMILSSIVKNGIRDYEFNALKKDFVDYYGVDYLPVINTLAELSLLTSKKSQPLEQNPNSQLIKDFHNLSTFLNLLPGTEETNLLNPTELDFALPGFVPVITRLIQSVYTRSFIGPNSNPVIPYIAGSNKKYNWKGLDIINTYLTGTMQSKLLIPKSKEQIFTHRTAAPPHSRKGVLRNEEYIIVVMLGGISYGELSTLRVAISKINESMNLNKKLLVLTSSVLKSDDIIKLTK

SEQ ID NO: 126 - protein, 566 aa, Saccharomyces cerevisiae
MEYWHYVETTSSGQPLLREGEKDIFIDQSVGLYHGKSKILQRQRGRIFLTSQRIIYIDDAKPTQNSLGLELDDLAYVNYSSGFLTRSPRLILFFKDPSSKDELGKSAETASADVVSTWVCPICMVSNETQGEFTKDTLPTPICINCGVPADYELTKSSINCSNAIDPNANPQNQFGVNSENICPACTFANHPQIGNCEICGHRLPNASKVRSKLNRLNFHDSRVHIELEKNSLARNKSSHSALSSSSSTGSSTEFVQLSFRKSDGVLFSQATERALENILTEKNKHIFNQNVVSVNGVDMRKGASSHEYNNEVPFIETKLSRIGISSLEKSRENQLLNNDILFNNALTDLNKLMSLATSIERLYKNSNITMKTKTLNLQDESTVNEPKTRRPLLILDREKFLNKELFLDEIAREIYEFTLSEFKDLNSDTNYMIITLVDLYAMYNKSMRIGTGLISPMEMREACERFEHLGLNELKLVKVNKRILCVTSEKFDVVKEKLVDLIGDNPGSDLLRLTQILSSNNSKSNWTLGILMEVLQNCVDEGDLLIDKQLSGIYYYKNSYWPSHI

SEQ ID NO: 127 - protein, 511 aa, Pichia pastoris
MTWKKIKATQSGRPFFDDIDEVIVYIQDDIGLYQDNTKLDKFQTVRFYLTNKRLIFINELFPEENYYILLHEIQEVSLYQGFINSSPKLILDLVKTEGEETKRMYRISWICTICSFSNHVQLDKPLAKFNEANNEINFKCSMCGIKPERLILKDGSSKADSFEPELKPVEATTASKRKHRCPQCTFVNHPSMLNCEMCNFPLRDKDSFDDSDILLGSKDSTTFKLSFHDKKVQPFSDKLQHYIEKSQHDFLKRFNRMNMNVVQQPASPVGPSKETPKKGIHDLENNSSNFIDSSFLNDSLSGLGRLMRHAEKLIRLSESMKPLMMNLHQCSHENHQLISLLKSNKPPHKINNGIIVESDTKKSLYHKEVARQLVEFILNYDLVQNDFISLCELYKLYNKSRGLNLLSPSTFKLICEQLENVNSIVKLYQIEYHNNNSFYIISKTSSTNYNLSNKVNTLLEENPSDLKQLQIAMNNCNFSILKSVVDELCSEGVIVLDQSIGGNVYYINHYF

SEQ ID NO: 128 - protein, 213 aa, Saccharomyces cerevisiae
MKVKATKLRIKQRRKNKGLNISRLDIIRAEMDVVPSPGLPEKVNEKSKNIPLPEGINLLSSKEIIDLIQTHRHQLELYVTKFNPLTDFAGKIHAFRDQFKQLEENFEDLHEQKDKVQALLENCRILESKYVASWQDYHSEFSKKYGDIALKKKLEQNTKKLDEESSQLETTTRSIDSADDLDQFIKNYLDIRTQYHLRREKLATWDKQGNLKY

SEQ ID NO: 129 - protein, 192 aa, Pichia pastoris
MATPPVPPLPSLPKEEVPAKIEFPLESVKGLDPSISSVPLSKLKELLDNQKLLKSYLLDSLQEFNQEIIHTLDENIRSLQNLLQQYEDNSKDIDQLNKSLDELNVLFRRWKQTEIEMYTILQRYQPNSLSKKLFELLEQSHLESQQLVSKLEGSVQESDLQSFIREYRAKRKLYHLRKEKYHRCQEERVRFV

SEQ ID NO: 130 - protein, 1049 aa, Saccharomyces cerevisiae
MLRAQKLHSLKSSDITAILPTEQSQKLVLAKKNGDVEVYSRDGNTLKLFQVYPDLLQNAKNDPLPPVIENFYFANELSTIFAQCKETLILLSTTNLHEYDRIIDRRGINHCWLFERSHKNKEEKNTYLIYSTINTAKMRVLIWEGRTYKNMMEASLSYRKETIRSIYPGETGITLATDLGIYHWPYNKPSLIRIEKTVKNKFPKDMISALTELKEQAEKVIEKKPKKNSHFDAQSFSSMDRMSRKSSMSSLWYRTIRNERGNKIRYTFELDGNDATPMIIDGATKKIFKVELMHNNEEPFLIATDHATFSESNSEFDHMQYLSSNLLMLYNSSTIKFVDYENGFTFLQQKIPEGIKWVKNLSGTYFLVWTSNDEVQLFSYHVDDGSEDDDQESICGDINDPDFYQLWRKVLFYKFFIDSPHSKELCVSDNPEESLDICAMKLRDLTVMWCLRIFDKFQNYMVQLERSRNSRMIRSKCEEMIIKSIFDLFIKFWAPPQLVILKVFPSAISSLVLEITGQEHHCLLKEAEEVKETYDIPPHLLNRWCLPYLTDTRRHLQNLLSKENDDESRITWCYRDREIKQSFDFFLISNHDDVDLNTMLTLIDTVLFKCYLYYNPPMVGPFIRVENHCDSHVIVTELKIRHMFKDLIDFYYKRGNHEEALKFLTDLVDELENDNTDQKQRQKIDHGVKILVIYYLKKLSNPQLDVIFTYTDWLLNRHNDSIKEILSSIFFYDSQACSSRDHLKVYGYIKKFDKLLAIQYLEFAISTFRLEGNKLHTVLIKLYLENLDIPSTRIKLKSLLETTSVYEPRTILKLLNDAIESGSDQLPTNQLNFVKYLKIFPLSKLENHKEAVHILLDEIDDYKAATSYCNDVYQSDSTKGEELLLYLYSKLVSIYDSNRNSKLILNFLQDHGSKLNSAEIYKNLPQDISLYDIGRVVSQLLKKHTSKMDETRLEKALLQVELVATTYKLNERMSSYGVLSDSHKCPICKKVISNFGTDSISWFTREGRNIITHYNCGKVLQERFNAKNEKSSRIKQKTLGEVINELNNK

SEQ ID NO: 131 - protein, 992 aa, Saccharomyces cerevisiae
MTTDNHQNDSVLDQQSGERTIDESNSISDENNVDNKREDVNVTSPTKSVSCISQAENGVASRTDESTITGSATDAETGDDDDDDDDDDDEDEDDEDEPPLLKYTRISQLPKNFFQRDSISSCLFGDTFFAFGTHSGILHLTTCAFEPIKTIKCHRSSILCINTDGKYFATGSIDGTVIIGSMDDPQNITQYDFKRPINSVALHSNFQASRMFVSGGMAGDVVLSQRNWLGNRIDIVLNKKKKKKTRKDDLSSDMKGPIMGIYTMGDLILWMDDDGITFCDVPTRSQLLNIPFPSRIFNVQDVRPDLFRPHVHFLESDRVVIGWGSNIWLFKVSFTKDSNSIKSGDSNSQSNNMSHFNPTTNIGSLLSSAASSFRGTPDKKVELECHFTVSMLITGLASFKDDQLLCLGFDIDIEEEATIDEDMKEGKNFSKRPENLLAKGNAPELKIVDLFNGDEIYNDEVIMKNYEKLSINDYHLGKHIDKTTPEYYLISSNDAIRVQELSLKDHFDWFMERKQYYKAWKIGKYVIGSEERFSIGLKFLNSLVTKKDWGTLVDHLNIIFEETLNSLDSNSYDVTQNVLKEWADIIEILITSGNIVEIAPLIPKKPALRKSVYDDVLHYFLANDMINKFHEYITKWDLKLFSVEDFEEELETRIEAASEPTASSKEEGSNITYRTELVHLYLKENKYTKAIPHLLKAKDLRALTIIKIQNLLPQYLDQIVDIILLPYKGEISHISKLSIFEIQTIFNKPIDLLFENRHTISVARIYEIFEHDCPKSFKKILFCYLIKFLDTDDSFMISPYENQLIELYSEYDRQSLLPFLQKHNNYNVESAIEVCSSKLGLYNELIYLWGKIGETKKALSLIIDELKNPQLAIDFVKNWGDSELWEFMINYSLDKPNFTKAILTCSDETSEIYLKVIRGMSDDLQIDNLQDIIKHIVQENSLSLEVRDNILVIINDETKKFANEFLKIRSQGKLFQVDESDIEINDDLNGVL

SEQ ID NO: 132 - protein, 1072 aa, Pichia pastoris
MVENTENSEKSSIDLSTSDRASQKPELPEAVLVDGNNELAKVDDSGEEERGKKEQEQQEDKEGEEEGHNQQTEEANGSIKTSKAKEENGAAVSVHEASSKDDETLDEQKEGQNGVDKTTEASNKVAQQQLDASDNLDSLDSSTSDLSDELQSQSDVNDNPDAELPQFTFHRISQLPPSFMKHDPISASYIHEKFFLFATHNGFIHISDNNFQEIRTFRAHRASILSLHTDGEYFASASMDGTVVVGSILNDKDIVAYDFKRPVHAVIIDRQYKVTKSFISGGMSGEVILSTRNWLGQRADTVLETEHGPITSIKCVDDLIIWTNDKGITFYQTSTRTMLLNTPLPKGFNRPDIYWPKYSFPETDRLIVGWNDHVWFYKLTIPQTVQTLQAANFLSTAASSFRIGAVEKSVELESHVHLPDTIIGGISSINDNLIVLNYLAPVEDKSNNSRRPKMKSAPPELQVIDPWTKEELSVDIIEPKDYATLGVNDYHLEKSIGEMVRWFLISPNDAILIKEFSLHDQLEWYIEHKMYQKAWSISEYILPPLERITLGVQQVHEYINSEKWSEAGELLTKVLAHSDDTSKEHQEYIKGEWANFLDLFFEKGHQDQIVDCIPKVYFPNSAVNIDPKIYGKYLEHYLTDWKNIPKFLQLYHDWDHRLLDLRYFQFLLDNTLNSNQNESNNKMPMVDKIRFLFIELCLEIDDPQPAVKHLIIMRDPGTLQFLISNHILGKFVDRLPEILTLELNDEELQYATVDFIREKLTTNIELLASKHREIMPSKIIELNERAGLSVINYLYLEKLSQLDKLLTKDFEDEMVMLYAKFNVSLLYNFLSKHNNYNIDSAIEICEEMHCYKELVYLWGKIGKNKKAVTLIIDKLEDPDLAIQFVATNNDSELWDYLLEYSMDKPKFIKALITAANSSQYFNNMDDPFVLKIDPISIVKRIPERIEIEGLKRALMNITYDNYLELTINKIILQIIQEETLEIGNFYRKERLKGATLEPRQNSKFLKETVIMYSDPAKPLVTETEVVGEGNEWKQVVNEDDNATIDISTKISHLNYIRQKLVLLRLRSENGRT

SEQ ID NO: 133 - protein, 316 aa, Saccharomyces cerevisiae
MAANSVGKMSEKLRIKVDDVKINPKYVLYGVSTPNKRLYKRYSEFWKLKTRLERDVGSTIPYDFPEKPGVLDRRWQRRYDDPEMIDERRIGLERFLNELYNDRFDSRWRDTKIAQDFLQLSKPNVSQEKSQQHLETADEVGWDEMIRDIKLDLDKESDGTPSVRGALRARTKLHKLRERLEQDVQKKSLPSTEVTRRAALLRSLLKECDDIGTANIAQDRGRLLGVATSDNSSTTEVQGRTNNDLQQGQMQMVRDQEQELVALHRIIQAQRGLALEMNEELQTQNELLTALEDDVDNTGRRLQIANKKARHFNNSA

SEQ ID NO: 134 - protein, 318 aa, Pichia pastoris
MVSIEIPRTIESEGTTLYVIECTLENNRITQTRRRFSEFLALKTNLLRLYNTSSFPFQLPSKTLFKVTDETKEKRRVQLSNFLNDLVQKEEWRDNIYVREFLSLPNSYFKRLRNNQNVNFSLGKKRSIANSSEWLQLANEVRTLIQTGRTQLFAKQTLEARMILVGLQSKLQSLDPIPQDSLGAGELSKRKNMLVGFKRDYSELNSLLNELSRSSPQEESKPRLFNTRRVLGGPEPETDSTRPLENNELLQSQQMIMQTQDQKIEELRSAIQRQRELGTIINQEIGEQNELIDELDDQLDVSTDKMNIARQKVSKVLR

SEQ ID NO: 135 - protein, 633 aa, Saccharomyces cerevisiae
MLSKVLLNIAFKVLLTTAKRAVDPDDDDELLPSPDLPGSDDPIAGDPDVDLNPVTEEMFSSWALFIMLLLLISALWSSYYLTQKRIRAVHETVLSIFYGMVIGLIIRMSPGHYIQDTVTFNSSYFFNVLLPPIILNSGYELNQVNFFNNMLSILIFAIPGTFISAVVIGIILYIWTFLGLESIDISFADAMSVGATLSATDPVTILSIFNAYKVDPKLYTIIFGESLLNDAISIVMFETCQKFHGQPATFSSVFEGAGLFLMTFSVSLLIGVLIGILVALLLKHTHIRRYPQIESCLILLIAYESYFFSNGCHMSGIVSLLFCGITLKHYAYYNMSRRSQITIKYIFQLLARLSENFIFIYLGLELFTEVELVYKPLLIIVAAISICVARWCAVFPLSQFVNWIYRVKTIRSMSGITGENISVPDEIPYNYQMMTFWAGLRGAVGVALALGIQGEYKFTLLATVLVVVVLTVIIFGGTTAGMLEVLNIKTGCISEEDTSDDEFDIEAPRAINLLNGSSIQTDLGPYSDNNSPDISIDQFAVSSNKNLPNNISTTGGNTFGGLNETENTSPNPARSSMDKRNLRDKLGTIFNSDSQWFQNFDEQVLKPVFLDNVSPSLQDSATQSPADFSSQNH

SEQ ID NO: 136 - protein, 613 aa, Pichia pastoris
MIRLLALFFARQILANEITDPTDENPVLVGPEAPEEETNPLTEEIFSSWALFIVLLLVVSALWSSYYLQQRRVKSIHETVLSIFYGMFVGLILRVTPGHYIQDAVKFNSGYFFNFLLPPIILNSGYELHQANFFRNIGSILTFAIPGTFISAIVLGVILFIWTKLGLDGIDVSLVDALSVGATLSATDPVTILSIFNSYKVDPKLYTIIFGESLLNDAICIVMFETCQKFHGQAVSVSSVLKGIGLFLMTFTVSLLIGVVVGVFIALVLKHSLIRRYPQIETCLVLLFAYESYFFSNGCHMSGIVSLLFCGITMKHYAYFNMSRRTQIATKYIFQLLAQLSENFIFIYLGLSLFTEVELVFRPMLIIVTTISICISRWCAVFPLSRLINWTTRAKHKGGSSAINYTQDEIPPNYQMMIFWAGLRGAVGVALAMGLQGEAKSSLLATVLVVVVLTVILFGGTTAGMLETLNIRVGVIDEQESDDEFDIEAPKPMQLNQIIPGATTPVYSIYSDAAGSRSRTGSQQSFYNNEDEDAADAPPDMNDDEMTSDLDDIPPMANQAQSSKINLQSMSFNNLLSMDDHAKWFTHFDEQVLKPVLLDNLTENNNSKDKIED

SEQ ID NO: 137 - protein, 204 aa, Saccharomyces cerevisiae
MSRNSAAGLENTLFQLKFTSKQLQKQANKASKEEKQETNKLKRALNENEDISRIYASNAIRKKNERLQLLKLASRVDSVASRVQTAVTMRQVSASMGQVCKGMDKALQNMNLQQITMIMDKFEQQFEDLDTSVNVYEDMGVNSDAMLVDNDKVDELMSKVADENGMELKQSAKLDNVPEIKAKEVNVDDEKEDKLAQRLRALRG

SEQ ID NO: 138 - protein, 206 aa, Pichia pastoris
MSGLEKSLFQLKFTSKQLNKQALKAGKEEKAEKAKVKKALTQGNSDIAQLYAQNAIRKANERVNLLKLAGRIDAVASRVQTAVTMRNVTGSMAGVIRGMDKALQTMNLERISLVMDKFENQFEEMDSSANYYENVTNDINVTQQPQEEVDLLMSQIADEAGLELKQNLNETGVSDGLANLKQSPGKNKANEEDEDQLAQRLRALRN

SEQ ID NO: 139 - protein, 330 aa, Saccharomyces cerveisiae
MASNAARVVATAKDFDKVGLGIIGYYLQLYAVELILSEEDRSQEMTALATELLDTIEAFKKEIGGESEAEDSDKSLHVMNTLIHDQEKAKIYMLNFTMSLYNEKLKQLKDGPWDVMLKRSLWCCIDLFSCILHLWKENISETSTNSLQKRIKYCKIYLSKLAKGEIGSSDEKTLDYADFADDSEEIKDEDVDHQTSDLENNNNDKVEGLAPKDQTTSYEPVDEVPEFIDDADSVNEEEQTVDKNEDAITKDEQQVVKKEVDLTRPSAPSEPAAAEHKSYTKDELTKIMDRASKIEQIQKLAKYAISALNYEDLPTAKDELTKALDLLNSI

SEQ ID NO: 140 - protein, 361 aa, Pichia pastoris
MSEIPEIPESISKLVGPLLKRASEVKLVDPAVAYFCLLHAAESILNKGLHQTSDEVAKFAMTLLDLVEKTKSEASEDLLELFNNQEAGFLHTEQFAVAVFNKAFLDVRNKTTTKATIDKFRASLVFFDLLNLWDFPLSDETLMKVKYAKYHAARILRAYKAGQDPNDYVLDSQSNDDIQEESIDTTNQNNQTKEDTKPVLSISSPEHSPDLQGKSPSPDLPSPPKFIKDNQNIVGDSALPSAPTFIKGDDAMFPKTPSFIDDSNNSKKTENIPEEARAPSAPIIPKSPTAVKPMSSPAFPKTKKQSHLGAQDIKEILDTEESITKAQKHAKYAISALNYEDISTATKELELALKLLKSLSQ

SEQ ID NO: 141 - protein, 208 aa, Saccharomyces cerveisiae
MSSRKKNILKVIILGDSGVGKTSLMHRYVNDKYSQQYKATIGADFLTKEVTVDGDKVATMQVWDTAGQERFQSLGVAFYRGADCCVLVYDVTNASSFENIKSWRDEFLVHANVNSPETFPFVILGNKIDAEESKKIVSEKSAQELAKSLGDIPLFLTSAKNAINVDTAFEEIARSALQQNQADTEAFEDDYNDAINIRLDGENNSCSC

SEQ ID NO: 142 - protein, 205 aa, Pichia pastoris
MSSKKKTILKVIILGDSGVGKTSLMQQFVNRKFSQQYKATIGADFLTKELVIDNKNVTIQLWDTAGQERFQSLGVAFYRGADCCVLVYDVTNNKSYDNVVSWKDEFLVQANIKNPETFPFILIGNKIDVEENKRQINNKKAQQLCAQLGNIPYFETSAKEAVNIDQAFDVVARNALQQEESLDFGDDYTDAINIHLDGESSTCGC

SEQ ID NO: 143 - protein, 190 aa, Saccharomyces cerevisiae
MYRFCAHAYLLLKYEKYHNQNQQLKKLWASFRCLFRLAAFALPRRYQSFFEAELILKNSTLETRLTLYRRLRSRLRLKNKNYTRSSSIMFNIQTTFPPHGEMKTFIVLREVDLLLLSLEFMNVSLARADLLVRNLHYFAIHSTLVMLHQYEYIYLMLTSGFCRYLGVCFFMIIQKYVTPGVMLGRWKVTA

SEQ ID NO: 144 - protein, 467 aa, Saccharomyces cerevisiae
MRISKNSHKRQRTRLYFLVTFIIYSIIPCRAVLVPWLDDDPFEATLLEMGDEPWSKDILSSTPPLHPSEVTEDNKSLKQRGNVPQYVIDNSPLLHLYSEEKYWPADVKDFVKRFQLRDHSGEKIINEHLRDLSDLQEYYSVELENGTWGRVSSEGTYMTSLDDFDKGPDWLLGEQPEYGTGHIKKAPAVLFVVDKGNGWVDAFWFYFYPFNWGPYIMGSGPWGNHVGDWEHSLVRFYKGEPQYLWMSAHGGGSAYKFEAIEKIKRLRRVDGKLTNEVIKKPLIFSARGTHAHYASVGQHAHDVPFFFMPLSDFTDRGPLWDPSLNYYAYTVTVGEKMTPCGAEETKMGLEWLSFKGAWGDKQLRPRDPRQKWCPFQWKYIDGPKGPLFKNMERVSLCQRFKWWNFWKGCPARRYIKRGEGLDAEKNDLVGDNCGILLYNIRPKWLRSILRFLTWRGSVCFIMDYFTG

SEQ ID NO: 145 - protein, 424 aa, Pichia pastoris
MLPLLVLSLLLVLGSFSHPTKTSQGGNLHVNNILKSSKRLSGYPPLFPEHKRIIQDGQVPYYVVEYAPLVHLYSEEKYFPCDIARYVDHFHAVFGNGSDVPGGQHLNIGALSKLNHYSAAKEGSEVYLMANTDFDKNPDYITGRHNKPKYINGEIEEAPAVLIVVDKGNGWVDAFWFYFYGFNLGPFVMGTGPFGNHVGDWEHSLVRFYNGSPIIVWMSAHGGGGSYFYKNLEKHYNDDKRPVIFSARGTHANYASVGQQNHDLPWAMLSDFTDRGPLWDPTKNFLAYTYSDGRITYANGSHPKREERYGDWLYFEGRWGDNKLPSSDERQKWSPFEWKYIAGPTGPLSKNLDRLSPCQRTKWWNFWDGCNTRVYPKMGQGIESEGNNGCGNIFRGIRSGIVRSFVQTITWGGWGCWVLDLIYG

SEQ ID NO: 146 - protein, 108 aa, Saccharomyces cerevisiae
MKEVTKMLYCALLVTKVIYQMKGKSQPKRERKKQNYWVLKSLWKRPQRQAIMSKLYSKRLPNRCLNFKTASQLLWIAKMQIVQTKINRESLIFLQQRSRNKALVSVST

SEQ ID NO: 147 - protein, 604 aa, Saccharomyces cerevisiae
MVELEKRRRPPPQLQHSPYVRDQSNSQGMTKTPETSPPKRPMGRARSNSRSSGSRSNVDIDQYTIPPGLDLLPTASSPPSVHQVSQQQQLSPILANKIRSPFENQSQDQNDNSIDPTPAGQVTIPVEAVSPPALDELSKFQNGSTETLFRTGSPRKKHTHIIILKSLNATFETKFLVVPFKPDGLKLGRPVTNSVNKNNSGSKRDLFSQQVRPDNGNFDSRVLSRNHACLSCDPTSGKIYIRDLKSSNGTFVNGVKIRQNDVELKVGDTVDLGTDIDSKFEHRKISAYVEEISVIPLMNTVSDPTNLVMKKQDHTNKNNGNSTNINGIKIDRGHHNQHIPIRSHLKENYTEAGVTSATTAQRAAFEAAMFGDINNSELDDDILGPETEVLSGIFINNSAGTSINLINMIKTLTTELSLEKQELEKLHSMQNFMQNYTINLDFINKHMIDMNEKHLLKLSTALQKTLSENNDALLKESEDQLKEIKQQNNKVKSACSLKEKQNHEKLQELESELRELNLQIEEERGKNLVLTQSNFNGGINNDNNAKVKQNDSREEKKDTEDTLISTEELGVVEGKRTRVSKGMLFGVVAISFGLVATAVKQLPQ

SEQ ID NO: 148 - protein, 447 aa, Pichia pastoris
MRKRSSSKSTSNYQPIRRDPPELTTKLHVVKLVPLNKSFELVKVLVVPDYPKELELGRQAGSRAGTSLTNAYFASRTLSRSHASLFVKEGKLYVRDLKSSNGTFINDVRLEHKKEYLLNVGDELTLGSTLESQPLHKKIQVKVEKFLTMNLQEYEDLVQGLVIDNDERKAELFNDTLDALLFSDALDSEDKILDALVAGDPNLDSLEVEPTVPTPGVSPSPNLKGITRLEDVTRRLIISINNENIQHQKLLAMGHFLDEYLNHEFSNGKSSSKETKQSGVSQEDHDRLFKEMEKLALENELLKSQITSKDEEEDYDISSEEEMDDRRRLEKEIVESINSITNSKQNGKVATALTNLLEDVKGENVKDDAVVLAANESASERIHDEVEDSRHSQHEPYKDCSIQTDSFNTVTPKDTVKNGNRNYLTIPILIAVIILLLAYNLRNNSSL

SEQ ID NO: 149 - protein, 104 aa, Saccharomyces cerevisiae
MRHCIIFIVCISIVEIRTVHIEFIKEIVVIFRIVDHFSPFMLPCLLSHCKDGDTIIFVCQSVMKVRNISLWNKLVLVRHCVLLCAFLLSFFNVLHSIISICRIF

SEQ ID NO: 150 - protein, 300 aa, Saccharomyces cerevisiae
MEKYTNWRDNGTGIAPFLPNTIRKPSKVMTACLLGILGVKTIIMLPLIMLYLLTGQNNLLGLILKFTFSWKEEITVQGIKKRDVRKSKHYPQKGKLYICNCTSPLDAFSVVLLAQGPVTLLVPSNDIVYKVSIREFINFILAGGLDIKLYGHEVAELSQLGNTVNFMFAEGTSCNGKSVLPFSITGKKLKEFIDPSITTMNPAMAKTKKFELQTIQIKTNKTAITTLPISNMEYLSRFLNKGINVKCKINEPQVLSDNLEELRVALNGGDKYKLVSRKLDVESKRNFVKEYISDQRKKRK

SEQ ID NO: 151 - protein, 286 aa, Pichia pastoris
MEKYTTYRDKGTGISPFLPLNKPKVNIFLRLVGVVLGVLKLLVLLIVGLLYPVVPLLSTKAVLFLLNVDVDVSVDNIKKANKPLIQLNLPQKGDFVISNYQSPLDPLVLSLITNNRLKNIVWLIPDIEGNLYEYSLFGVVVHALSSPNLHAQKNGKKIQLSSISESKTVFLFPEGTTSNNKSILPFLVTTDTVSVPKLFKKFKVKALSIKNENPYTTTPIPQALASYLLTNLFTRNSSHYRLKEFILDKDHTWPEIRDLLSNSGRLKLVGKDLSLEKKVEFIEKFR

SEQ ID NO: 152 - protein, 184 aa, Saccharomyces cerevisiae
MEADDHVSLFRFPFKIPTFRGIRKGGVYLSGALYALGFWIFLDAVLYSRYSNASDVHVTFIDWIPFLCSTLGTLIVNSIEKNRLLQGALSSDGGAFGSGVGDLDSSMAWQARTVLFFGFALLAGGLSGSIVVLIIKFLVKDYNTYPTLGMGVNNVLGNVCILLSCVVLWIAQNVEDEYSYSLTL

SEQ ID NO: 153 - protein, 174 aa, Pichia pastoris
MDEHRLFKFPVFRLPKSATVRAMGMYLSGALYAIGFWVLLDAALYSKRVNASLVHVTFVDWVPAICSSLGMLIINSIEKSALLNNDASFMQPSSTTTWQARVVLFIGFSLLATGIAGSFIVLILKFLIKGYNTFPTLGMGVANVVSNASIMLSCIVLWVVQNFEDDDYNYSLAL

SEQ ID NO: 154 - protein, 106 aa, Saccharomyces cerevisiae
MHTYIYIYTVYIQMVAFSPYRIVLPFVAFVDLASFSSFRSYQAFLRPFLRPFRHQTCSSYFALDLDFASAFVVPAASFVESLLAYQAYSAYQACLAYPACLACQAS

SEQ ID NO: 155 - protein, 811 aa, Saccharomyces cerevisiae
MRMIQRERKREKEEGQLKERTVVNMADPDDNEAEATGLQQYSGETTRDDNEESMNDSFTLTSRNRGRSNTISSIVSGYEIMKEHMDKEKFMYLILASLLLYMGFVAAFAPRTSLSRDFRRFHSSRLTNAEVYRIYLNSLQQENRAKEHVYKYAGYMSNGASDSSTFKYTLDEFLDMGYKPKVEKYYPWIGEPVDTNVAPLENGKVVYEASMIEDRVKGDPASHARKRQKGFHQYSKNGSVTARYVFCNYGSISDYKLLLKKNIDIEDKIHIVRSGKILPGLKVKNAELYGASSVIIYTDPFDDGKVTEENGFLHYPYGPARNPSYIRRDSVNYFSDTPGDPTTPGYPSKDSDTEHMSPVGRVPRIPSVPMSARDVQPILERLNGRGFQIGPGSNIKDFGSFTGPSSSIDKVHLHNELTYNIKEMSSVEVSIPGIFTEGEIIIGAHRDSLASSSAGDANSGSAILLEIARGMSKLLKHGWKPLRPIKLISWDGERSGLLGSTDYAEAHAAILRRRALVYLNLDNAISGTNFHCKANPLLQDVIYEAAKLTEFNGHEDWSLFDHWKYTSNATISLLDGLSSYTSFQYHLGVPAAHFQFNANDTSGAVYHSNSVFDSPTWLEKFTNSDYKLHNTMAMFVGLTTLMLSENELARFNTHVYLKKIYNWYIAWHSNLSSAFPQDDEVNSLAKRVLDLLKVATQEDSIQFDQQNGILYKECREALPVWAFYKKIKSYIKLQRSNSKSKQIDQLFITHRGLKDREWMKYSLLAPSKFEGSVGEVLPGLHEGLADIDRNEVIQWLTILLSQFSNVRYLLQ

SEQ ID NO: 156 - protein, 642 aa, Pichia pastoris
MREKFEEYGLKTSLSEYYVTLNEPKKVSVSLILDQNVVYTPELEGDEGRVAFHAFSANGTATGPLVFANHGTFEDFETLRGELEEALKGSVVLIKYSDLILPSLQVEIAEKFGVAGVLLFNDPADDHIDGKPFPSGPARNPQSTQRDTVNNIANSPGDPATPGWASKKHSRKLGNQQIPSVPSIPISFEAAKPMLDTLNGKKITKFPYPLNSTKHTVVLENIQEYKPKIITNVVGTIPGILGTEEIIVGSHRDSWTKFGEGDPISGTKTMLSMIQGFSKLLDLGYKPLRNIKFVSWDASKYGLIGSTEYAEDHQRYIRKNTLCYFNLDTAISGSTFYVGSHPMLKNLVIDASRTVLSPSSIKEEDYLYDYWLKQDNLTVETLGSGGDFSVFQNHLGVPSVQIGFVNGPGDAVFHKHSSFDNKVWMEKYGDPEGKKLDTISKFIGMLTLMLSESEVAHFNVDTYSTLTTDLYNNLINCKTINKWKNYYILEQEHPVCKKVWKQLNSGQVSGIKFVHLLDLVKSNFLKWNSASLIFHKYMKDLQEEIVEDYPWFKYYKKIKIAVQIKLANLKLVSLDNHMLIDEGLPKRPWMKHTILGSDRLTGQAILFPGLSEAIDEVNYEETVKWLMILSDKLESITSALSR

SEQ ID NO: 157 - protein, 819 aa, Pichia pastoris
MLFLPLLAISFFLIYLSDITQPLFRARKEDENPLEIYLKALETNEAHKWSKVYTSQPHLAGTNYGLVEFTKSKFEEYGFEASVDDYDVYLSYPIDHSLELYEHSEDKNDKLLYKASLQEDVLSEDPTTSGDDLIPTFLGYGANGNVSAEYIYANYGTKEDFEDLVARGVPIKGKIAVIRYGQIFRGLKVKFAQEYGAIGAVIYSDPGDDYGITPENGYKPYPHGKARNPSSVQRGSAQFLSVYPGDPTTPGVGSKKGVERVDPHATTPSIPVLPLSFKDALPILKKLNKEGLSVPDSWKGGLEGVDYSTGPAKNIHLNLYSEQNFTITPIYNVYGEIKGENADEVIIIGNHRDAWIKGGASDPNSGSAALIELSRGLHALTKTGWKPHRTIVLASWDAEEYGLIGSTEFGEQFEKFLQKKVVAYLNVDVAVAGTHLHLGASPSLFKLLKDNAKEITFKNSTETLYDNYVKDHGNDIISTLGSGSDYTVFLDHLGIPSLDIGFIAGKGDPVYHYHSNYDSYHWISTSGDPGFEYHNVLAKYLGSLVLNLSEREVLYLKLHDYATELLKYLLEAYAQMPEEWDDEVIGFRSSSCHRAKASHHGKDPHHEGRRHHGKGFHSKGGPHHGERHHGKGFHAEGGPHHEKGPHHEKGLHVEGEPHHQKGPHFEKGFHHDMEMYHKKLAHHGKEPKTKLKHLKKQVESLIIDFANTTQTYDAYTDFLQKQHEIRDSLSFWEKIKLHFKIKAANFKLKYFERVFLHENGLKNREWFKHIVYAAGRNTGYAGQRLPGLVEAIEDKNLHDAVKWLHILSKKIDSLQKSLE

SEQ ID NO: 158 - protein, 280 aa, Saccharomyces cerevisiae
MKALVEEIDKKTYNPDIYFTSLDPQARRYTSKKINKQGTISTSRPVKRINYSLADLEARLYTSRSEGDGNSISRQDDRNSKNSHSFEERYTQQEILQSDRRFMELNTENFSDLPNVPTLLSDLTGVPRDRIESTTKPISQTSDGLSALMGGSSFVKEHSKYGHGWVLKPETLREIQLSYKSTKLPKPKRKNTNRIVALKKVLSSKRNLHSFLDSALLNLMDKNVIYHNVYNKRYFKVLPLITTCSICGGYDSISSCVNCGNKICSVSCFKLHNETRCRNR

SEQ ID NO: 159 - protein, 187 aa, Pichia pastoris
MYRVSEIPRGSDPDSYFSSIYKPASGTSRTTAGPSSGTKRSSRVNYNFQSLEAQAHGNTVPTTQAEEKASNKRFEELNRENYNEQAKIEIPKSGLEAFTKHRRLKPGETASTKRILASRKTLVNYVEEVDPQLMKIFKATTVPSNRRHLKKLCSICGNNAPATCVKCGARFCSVSCGRTHEETRCTW

SEQ ID NO: 160 - protein, 795 aa, Saccharomyces cerevisiae
MSDEGADKSLDTNTEFIIQTRSRRSNAGNKLQKLLEQELRDIESTKRQISSYKNGNDDEEDEIGLLFQEDEDDEDFEMMAKDDDDEGEEKEDETQSIRKEPSQASSEQAADDLMFSSSESEDSSNENDEDAEEKEIRRQELLSRKKRNKRLQKGPVVIKKQKPKPKSGEAIPRSHHTHEQLNAETLLLNTRRTSKRSSVMENTMKVYEKLSKAEKKRKIIQERIRKHKEQESQHMLTQEERLRIAKETEKLNILSLDKFKEQEVWKKENRLALQKRQKQKFQPNETILQFLSTAWLMTPAMELEDRKYWQEQLNKRDKKKKKYPRKPKKNLNLGKQDASDDKKRESEESIKNDGDVNSLGENSSSVHNQKRIEETSTNDTVEGESSPDAAVSRVNSDELKPTALPDVTLDAIANKQSTVDEAPNSQPQKNIITNEQKITNVGEPIQNLHNEEIKDEMVSALESRENTFENSSPAAQVVSQRDNSATPTPSNSTGTEDTILISPDTDIKGEPEPCLKTEGIENLSHNVPQETKSNTDVSFLKQVTFTDHPQVAIIDTEESPSKKDTANVDESSAENSLSTQTYEGPEQLTSRNFVTLYDFPNAPPNLKDFNTNLFGDRWSYTNGLSATQRPQDMKTVFHSILPSPPQSSVPSPTVDISLDLSALANFPSFGEYDKKIVHQINTEINKDLEIKIKTQPPTGVFLANGIRKKCLITNKECQYFDPRTGVPYSDVEAYKIIQRIQDPISKEEGRSDIKRDETTNEDSDDQVRFKWFGFKNGGIYLDLSQRPAKGVPEGF

SEQ ID NO: 161 - protein, 731 aa, Pichia pastoris
MSSSSESEEELGIIATRERRANAGSRLKQLLQQEELDIGSQDFEQDDDDENVNLLFQEDENDDEFVEENEEEEEGEEDEEEDDEEDKENTPSNKAVSEEPNDEMFSSESEISASDSDESEGEREFRREEKLKRKKRAEKAKFIPPVINKSTPKKTKPKTKVTAHSFLNASSRASTRKSAVENKLAIVERLKEEEERRSKLKPVIRKEVVALTQKERLAEAKTTERTNVLSLNKFHEQEQERKEKQKQMMLNRRKKLENVLRFYSASALVYPIDELKDLEKVKKIEAEFMKSHKKRVYKKRKKKTEANKDESTETPKGEVKVEASENTKDGKKDDHAPIKTNELDTKETDNQGENLPIRDDNKQDETTLSTVDNSPDINKAPTEIDIVEDRDVVMKDATDSAEVVESTSSPLLSSKEKIDNENVQSKESSEPTVDIKTEAESSIEPSQKTKKVSFNEESSQLEFSTESPVASLINNNVKETEIKKDVNQTFVKPESETEIETETEPRTQSNDKQEEEEEEEEEEEKTDSKEEEVQYEGPPQFVARNTIELLEFSKKLTKLEYTKYILGDQAVLPAQRRTSHLKPLIRIKQLPTMIETLFIPYSSTHEKEFHEILTLPKFGEENKTVHKQLLVKESDTKKIEIITPAPIGIYLPNGSKKICPISGKPASYFDPKNGVPYASVEAYKVLKDVQDEQFAWIQPDKGGEYSRYKGGIGAYLQRWDVRHAKNVPDWF

SEQ ID NO: 162 - protein, 486 aa, Saccharomyces cerevisiae
MNRILSSASLLSNVSMPRQNKHKITKALCYAIIVASIGSIQFGYHLSELNAPQQVLSCSEFDIPMEGYPYDRTWLGKRGYKQCIPLNDEQIGIVTSVFCIGGILGSYFATSLANIYGRKFSSLINCTLNIVGSLIIFNSNSYRGLIIGRILVGISCGSLIVIIPLFIKEVAPSGWEGLLGSMTQICIRLGVLLTQGIALPLTDSYRWRWILFGSFLIAVLNFFMWFIVDESPKWLLAHGRVTDAKLSLCKLRGVTFDEAAQEIQDWQLQIESGDPLIEPTTTNSISGSNSLWKYLRDRTNVKSRHVITVLLFGQQFCGINSIVLYGTKIISQLYPQHAIRINFFISMVNVLVTILVSLLIHSLPRKPLLMTSTVLVSVTAFIMGIAMNHNKMNLLIVFSFIYMGVFTMGLNPLPFIIMREVSKPQDMVLAQRYGTICNWVGTFIIAYTFPIIHDVLSGYVFIIFAIIACSISAFIWKKVPETKRSG

SEQ ID NO: 163 - protein, 493 aa, Pichia pastoris
MPLDESDSAELLGSNYLSQSPAISLPLVLAVLMSCLSSVQYGYHMSELNAPESVYTCRTPITGPHEDYAKSWFGRHGYKSCIPLDVNQIGIVTSIFTIGGLLGSLYAGQLSENIGRKKMFTANSLVFAVGSLLESLSNTYGQLLCGRLLSGIGAGSGIVVSALYINEVSPVELRGLLGSMNQIFINVGILLTQLLAIGWTNDEQWRYILVTAFVIAIVNFVASNFALESPKWLAIESSNSREALAVLFQLRNGDLNRCQEEITSWEREKLSRERYIAENPEQANLSLKSYLTSSKYSRSRRNVTFIMVGQQFCGINSIIFYGVKVLVSLFPTGALAINCLISLLNLTVTGTASLFMDRWGRKPLLLTSATLMGISSVAMAVGIINSVAVLSVLATFLYVGSFAVAIGPIPFLIVSEISQQEVRGIAQSWGTAANWIATFAIGYLFPIVNEYIGGYVYFIFAFMCFLFGYYTYLYIPETKGKGTYKEVWGDEIR

SEQ ID NO: 164 - protein, 345 aa, Saccharomyces cerevisiae
MSTLQRRRVNRADSGDTSSIHSSANNTKGDKIANIAVDGDDDNGTNKKIAYDPEESKLRDNINIPTLTLMEEVLLMGLRDREGYLSFWNDSISYALRGCIIIELALRGKIRILDDSARKRFDLSERLIEVIDSSKTGEVLLDETLQLMKNDEPLSISNWIDLLSGETWNLLKINYQLKQVRERLAKGLVDKGVLRTEMKNFFLFDMATHPIADASCKEAIKRRVLSVLVSRNMELSYNEYFPETTSFKIIRTLALICGSYGANVLENVLTTLEYEKRDKAISRAEEIMAQFSQYPFDLEKETELGVSVNLNKEVKEEIENNPGHDLQLEVIAGVFEVFSRMDMLL

SEQ ID NO: 165 - protein, 329 aa, Pichia pastoris
MSEGLQRRRGVKSSNDSSEALDVNNKENNRVAFDPQDLSSNSREVQSPMLTLMEEVLLIGLKDREGYLSFWNDNISYALRGLILLELAFRGKIQMVNDPARRRFELPDRLIEVVDGSLTGEMLLDEALKLMKSDPTNSSVLNWIDLLSGETWNLMKINYQLKQVRERLAKGLVDKGVLRTERKNFFLFDMATHPISDPQAKRQVVKRMLNMLTNRNYIIENDPKYFAKECGYQHLRSVALVCGCYAGNVLENVVFDLNYEQRDRAFNRADELLSQYSDYPFENKKNTLGIGINLHDEIEAELDRDGRNEMMLEVIAAVINVFSKMDSIL

SEQ ID NO: 166 - protein, 264 aa, Saccharomyces cerevisiae
MMSDQENENEHAKAFLGLAKCEEEVDAIEREVELYRLNKMKPVYEKRDAYIDEIAEFWKIVLSQHVSFANYIRASDFKYIDTIDKIKVEWLALESEMYDTRDFSITFHFHGIEGDFKEQQVTKVFQIKKGKDDQEDGILTSEPVPIEWPQSYDSINPDLIKDKRSPEGKKKYRQGMKTIFGWFRWTGLKPGKEFPHGDSLASLFSEEIYPFCVKYYAEAQRDLEDEEGESGLSADGDSEDDDGSLGEVDLPLSDEEPSSKKRKV

SEQ ID NO: 167 - protein, 234 aa, Pichia pastoris
MEKVEREVEQFKATKTKDVYLKRQELTKQIPKYWFIVLSEHDDFSEYIQTDDLRFLENITDIYVDWDLENSRDFSITIAFDDSDNKITAQVVTKHFKSEIDEETNQEKLVSEPATIQWPKEYDSINPYKITDKKSAEGKKNYRKGMKTFFAWFSWTGKKAGKEFRSGEELTRALVEDIFPYSTKYYTQACLTGQIEGDSSSEELDVSDEEVDEKDEEEEEEEEEEHRTKKPRIN

SEQ ID NO: 168 - protein, 204 aa, Homo sapiens
MAGPATQSPMKLMALQLLLWHSALWTVQEATPLGPASSLPQSFLLKCLEQVRKIQGDGAALQEKLCATYKLCHPEELVLLGHSLGIPWAPLSSCPSQALQLAGCLSQLHSGLFLYQGLLQALEGISPELGPTLDTLQLDVADFATTIWQQMEELGMAPALQPTQGAMPAFASAFQRRAGGVLVASHLQSFLEVSYRVLRHLAQP

SEQ ID NO: 169 - protein, 614 aa, Pichia pastoris
MSTLTLLAVLLSLQNSALAAQAETASLYHQCGGANWEGATQCISGAYCQSQNPYYYQCVATSWGYYTNTSISSTATLPSSSTTVSPTSSVVPTGLVSPLYGQCGGQNWNGATSCAQGSYCKYMNNYYFQCVPEADGNPAEISTFSENGEIIVTAIEAPTWAQCGGHGYYGPTKCQVGTSCRELNAWYYQCIPDDHTDASTTTLDPTSSFVSTTSLSTLPASSETTIVTPTSIAAEQVPLWGQCGGIGYTGSTICEQGSCVYLNDWYYQCLISDQGTASTASATTSITSFNVSSSSETTVIAPTSISTEDVPLWGQCGGIGYTGSTTCSQGSCIYLNDWYFQCLPEEETTSSTSSSSSSSSSSTSSASSTSSTSSTSSTSSTSSSTSSSSIPTSTSSSGDFETIPNGFSGTGRTTRYWDCCKPSCSWPGKSNSVTGPVRSCGVSGNVLDANAQSGCIGGEAFTCDEQQPWSINDDLAYGFAAASLAGGSEDSSCCTCMKLTFTSSSIAGKTMIVQLTNTGADLGSNHFDIALPGGGLGIFTEGCSSQFGSGYQWGNQYGGISSLAECDGLPSELQPGCQFRFGWFENADNPSVEFEQVSCPPEITSITGCARTDE

SEQ ID NO: 170 - protein, 797 aa, Artificial Sequence
  CLP1-Met-GCSF fusion protein
MSTLTLLAVLLSLQNSALAAQAETASLYHQCGGANWEGATQCISGAYCQSQNPYYYQCVATSWGYYTNTSISSTATLPSSSTTVSPTSSVVPTGLVSPLYGQCGGQNWNGATSCAQGSYCKYMNNYYFQCVPEADGNPAEISTFSENGEIIVTAIEAPTWAQCGGHGYYGPTKCQVGTSCRELNAWYYQCIPDDHTDASTTTLDPTSSFVSTTSLSTLPASSETTIVTPTSIAAEQVPLWGQCGGIGYTGSTICEQGSCVYLNDWYYQCLISDQGTASTASATTSITSFNVSSSSETTVIAPTSISTEDVPLWGQCGGIGYTGSTTCSQGSCIYLNDWYFQCLPEEETTSSTSSSSSSSSSSTSSASSTSSTSSTSSTSSTSSSTSSSSIPTSTSSSGDFETIPNGFSGTGRTTRYWDCCKPSCSWPGKSNSVTGPVRSCGVSGNVLDANAQSGCIGGEAFTCDEQQPWSINDDLAYGFAAASLAGGSEDSSCCTCMKLTFTSSSIAGKTMIVQLTNTGADLGSNHFDIALPGGGLGIFTEGCSSQFGSGYQWGNQYGGISSLAECDGLPSELQPGCQFRFGWFENADNPSVEFEQVSCPPEITSITGCARTDEGGGSLVKRMTPLGPASSLPQSFLLKCLEQVRKIQGDGAALQEKLCATYKLCHPEELVLLGHSLGIPWAPLSSCPSQALQLAGCLSQLHSGLFLYQGLLQALEGISPELGPTLDTLQLDVADFATTIWQQMEELGMAPALQPTQGAMPAFASAFQRRAGGVLVASHLQSFLEVSYRVLRHLAQP

SEQ ID NO: 171 - protein, 603 aa, Artificial Sequence
  Secreted Clp1p fusion protein
AQAETASLYHQCGGANWEGATQCISGAYCQSQNPYYYQCVATSWGYYTNTSISSTATLPSSSTTVSPTSSVVPTGLVSPLYGQCGGQNWNGATSCAQGSYCKYMNNYYFQCVPEADGNPAEISTFSENGEIIVTAIEAPTWAQCGGHGYYGPTKCQVGTSCRELNAWYYQCIPDDHTDASTTTLDPTSSFVSTTSLSTLPASSETTIVTPTSIAAEQVPLWGQCGGIGYTGSTICEQGSCVYLNDWYYQCLISDQGTASTASATTSITSFNVSSSSETTVIAPTSISTEDVPLWGQCGGIGYTGSTTCSQGSCIYLNDWYFQCLPEEETTSSTSSSSSSSSSSTSSASSTSSTSSTSSTSSTSSSTSSSSIPTSTSSSGDFETIPNGFSGTGRTTRYWDCCKPSCSWPGKSNSVTGPVRSCGVSGNVLDANAQSGCIGGEAFTCDEQQPWSINDDLAYGFAAASLAGGSEDSSCCTCMKLTFTSSSIAGKTMIVQLTNTGADLGSNHFDIALPGGGLGIFTEGCSSQFGSGYQWGNQYGGISSLAECDGLPSELQPGCQFRFGWFENADNPSVEFEQVSCPPEITSITGCARTDEGGGSLVKR

SEQ ID NO: 172 - protein, 175 aa, Artificial Sequence
  secreted Met-GCSF protein
MTPLGPASSLPQSFLLKCLEQVRKIQGDGAALQEKLCATYKLCHPEELVLLGHSLGIPWAPLSSCPSQALQLAGCLSQLHSGLFLYQGLLQALEGISPELGPTLDTLQLDVADFATTIWQQMEELGMAPALQPTQGAMPAFASAFQRRAGGVLVASHLQSFLEVSYRVLRHLAQP

SEQ ID NO: 173 - protein, 485 aa, Artificial Sequence
  HSAss-TNFRII-Fc protein
MKWVTFISLLFLFSSAYSLPAQVAFTPYAPEPGSTCRLREYYDQTAQMCCSKCSPGQHAKVFCTKTSDTVCDSCEDSTYTQLWNWVPECLSCGSRCSSDQVETQACTREQNRICTCRPGWYCALSKQEGCRLCAPLRKCRPGFGVARPGTETSDVVCKPCAPGTFSNTTSSTDICRPHQICNVVAIPGNASMDAVCTSTSPTRSMAPGAVHLPQPVSTRSQHTQPTPEPSTAPSTSFLLPMGPSPPAEGSTGDEPKSCDKTHTCPPCPAPELLGGPSVFLFPPKPKDTLMISRTPEVTCVVVDVSHEDPEVKFNWYVDGVEVHNAKTKPREEQYNSTYRVVSVLTVLHQDWLNGKEYKCKVSNKALPAPIEKTISKAKGQPREPQVYTLPPSREEMTKNQVSLTCLVKGFYPSDIAVEWESNGQPENNYKTTPPVLDSDGSFFLYSKLTVDKSRWQQGNVFSCSVMHEALHNHYTQKSLSLSPGK

SEQ ID NO: 174 - protein, 467 aa, Homo sapiens
LPAQVAFTPYAPEPGSTCRLREYYDQTAQMCCSKCSPGQHAKVFCTKTSDTVCDSCEDSTYTQLWNWVPECLSCGSRCSSDQVETQACTREQNRICTCRPGWYCALSKQEGCRLCAPLRKCRPGFGVARPGTETSDVVCKPCAPGTFSNTTSSTDICRPHQICNVVAIPGNASMDAVCTSTSPTRSMAPGAVHLPQPVSTRSQHTQPTPEPSTAPSTSFLLPMGPSPPAEGSTGDEPKSCDKTHTCPPCPAPELLGGPSVFLFPPKPKDTLMISRTPEVTCVVVDVSHEDPEVKFNWYVDGVEVHNAKTKPREEQYNSTYRVVSVLTVLHQDWLNGKEYKCKVSNKALPAPIEKTISKAKGQPREPQVYTLPPSREEMTKNQVSLTCLVKGFYPSDIAVEWESNGQPENNYKTTPPVLDSDGSFFLYSKLTVDKSRWQQGNVFSCSVMHEALHNHYTQKSLSLSPGK

SEQ ID NO: 175 - protein, 8 aa, Artificial Sequence
  peptide linker
GGGSLVKR

SEQ ID NO: 176 - protein, 4 aa, Artificial Sequence
  sorting signal
QRPL

SEQ ID NO: 177 - protein, 4 aa, Artificial Sequence
  sorting signal
QSFL

SEQ ID NO: 178 - protein, 4 aa, Artificial Sequence
  sorting signal
QVAF

SEQ ID NO: 179 - protein, 16 aa, Artificial Sequence
  hGCSF N-terminal fragment
TPLGPASSLPQSFLLK

SEQ ID NO: 180 - protein, 9 aa, Artificial Sequence
  TNFRII-Fc N-terminal fragment
LPAQVAFTP

SEQ ID NO: 181 - protein, 1570 aa, Debaryomyces hansenii
MRIELRSWSSIAFLFTLFIAYVVSESNFKPDIKLTKEGEIAKEYNYFDDSSNILVLRKDKLAISFDDGVSWKNVKETENERVIRYQFDPFNNNRAFAFTIDKFQYVTNDKGETWSKFEIYDPKNEKEHLTLNSIPHILFNAKNPDLAIFVVYHCPEDKKISNQCVNYHFLTTDGFKSNPKSLQTDASICTFAKSTKSYDVGKDETIYCSRNKLNSFGHIVESYIVASDDFFKTESKINHALAKSGSIIDIRVLQNFAIVVVQNDKFNTKSKVSLLVSKDGKNFNEADLKVDISYGIMTFLESSSSSIFLAVMDYSNSFRKFSLSTVYSSDSSGLSFSKVLDKVQGGSIQKVETIDGVWLANIADEIKDNKGKSKTLLDMLMGGGIDKNIKSRISYNDGEDWNLLKINNDGSCTTESECSLHLLNPTEKSGDGKFVTGPTPGILLSVGNKGSKLEKDINRMNTWISRDGGISWDFALDEPCLFSFGDQGNIIVAIPYYGKNKMNSSNMYFSLDQGKSWENVALEIPIFPLTLTTTVDGTSQRFILSGLIDSTPKDKADYSFAETLYAIDFSKAFGGKKCDSKKDFEDIYTRLDPSNDKPICIYGHKEKFRRRKQNSQCFVNELFEDVKVYDDPCECTVIDFECASGFSRSKEKECKPDKKKLANICRDKKSKKISLPDKALASGNKCKNPKEAAKEFVKTKEFKCSDYLDEDDKDKNKGNKHDIVSTFNEFDSELQQYTYVEQGETYSGENIILRTKANVAYASNNGGVEFVKIPVSDEIVTYYPGLVPGQVILITDSEKFYFSIDGGNTFQKKTAPAKPNVIGARIISFDKKDTEKFIWYSSENCDNPFSRDCSLVAYITEDGGENFQKLKEDVRSCDFVADVFEDVSDEIKNMIYCTVEDKSSRKLMLLSSTDYFKQSKKVFDNVVGYAITGNFLVAATIDDAEQSLKAKVTVDGQIFADADFPPDFHVDSQQAYTVLDSASKAIFIHVTTNNENGHEFGSILKSNSNGTSYSLTLDKVNRNRIGYVDYDRIEGIEGVIVSNIVANDHSKDRKKLKTQITHNDGGEWSYITPPVIDSKGKKYKCNGKSLSKCSLNLHGFTERADYRDTFSSASAIGLMMAVGNVGEYLEDFDKCSTFISRDGGITWKEIKKGVYMWEYGDRGTILVLVNAEKTTDKLMYSLDEGDTWHDYKFAEEPIDVLDLATVPSDTSRKFLIFGKSDRKMVSYSIDFTNIHKRQCQLDLDNPNDDDFEYWSPTHPSTPDNCLFGREAKYLRRAIGHDDCFIGSAPLIEGFKVTRNCSCTRKDYECDYNFFRDSDDTCKLVKGLSPSNRKKEMCKKENAFEYFEPTGYRKIPLSTCVGGKNFDTWKVHPCPGKQKEFNKHHGKELNSGSLLAVIGIPIAVFLLATWFVYERGIRRNGGFKRFGQIRLDLDDDDFHPIENNEVDKAINKIVKGGIVIVAASIAGFKTLRKVDRMLFDKVTSSLFRRRPGHRNYVHVPEMDEEEELFGNFRDNYEEELEEGTNNINEDFNDEPNDYEYEEETNDEVDSRLFNIDDQSDEELQSATPEDN

SEQ ID NO: 182 - protein, 1566 aa, Kluyveromyces lactis
MFWWNILIWLGLWNFLPVLAQDFKPKVSFHSDVDTHGRLSILGFDDSRVVLKLLRGVELYRSEDNGVTWDSVGLPLSSDNKPQEWNHLVLDRIYKADVAYLSGENGVLATGDKGKSWKQLTFLDADNHKIDFSDYSNVGDENRKPIINVEIESHPTNKNARIINIYELGKLDGKFTLRQISFYSKDGNNFKLASSGSKSNDDSNPLNMFCSFVQKSSKSKLYKLKDKVICQESTVLSPFGDVSSKLYITDVNFKSLSPFAEQLQDLSPASTFISDNHLFILTLSDRFNENSAANLWRLEDDSTDKFEQISLGTQIRKSLMDVNEIDGRAIITIYHRERNKDGDNNDDEDKSPFEDIFSGSIEALISDSYGKNFRHLSFDEQKASSLTLSTSIFVKKTMFATWTNTMRDFGFFDFRSKVSFDLGNTWSKLKVSDPEGKWNYNCDINSDSNDCGFQMFIVYGGGVEGDSDIFSPGIIAAIGDVYEENPSGDFLKMGTFISRDDGSTWEKVLDFPSRVVMGDYGNIILAVPFDPESDKDPQSEFYFSLDQGKTFQEYQLDKSFYPTELLPSALDGSGNSFMLVGTIMSEDYQNLESVSYVVDFSDAFKGASCKTSDMEDWYYSNGQCVDGTILKFRRRKQDAQCLIKTTYKDLTFEEELCGCSELDYECADDFSIDSAGKCVPDFSKASLMEKCESKKSIQLEPKKISKTTKCKRPQNIIKEEISCAAVPAPSNVKVTENKFSSIFKSYQYFDTFVRESILFRTDKSEAYVSHDGGQNIKQIQTGGEDILEINFNPFFNSSAYLFGKNKNLFATHDYGLSFKVTELPAGRQLGFPLSFHAKDIQTFIYYGGESCESFFDPNCHAVAYITRDGGASFEKLLEGASNCEFLESAVESPRVENGIVCMVKDKSTGARSYVSSTDYFKTQTVLYSDILGFMSTGGYIVVAVSHGERQLRAYLTIDGVEYSEAVLPADLDSYEQKAFTVLGSQEGAIFMHMTTNLDKNEEFGALLKSNTEGTSFVILERAVNRNSFGFVDFEKIQGLEGIILINTVANAKEIVESKDKTSQKKLKTKITFNDGADWTYIKPPSVDSEGKKYNCNPKNLEKCSLNLHGFTERKDVRDTYSSGSAIGYMFALGNVGEYLTPVSEASTFMTNDGGISWSEVKKGSYQWEYGDHGSVLVLVKDNEPTDTVSYSINGGKTWKDYQFASEKINVYDLVTVPRDSAMRFLVIGSSVNVRGEETRTYTLDFVDMFSRQCQYSKDDLKDFEYISLSHPNTKECLFGHKAKYLRKKSDDCYVGMAPLEDKFRIFANCSCTRNDYECDYNFMRVSDGTCKLIDGLKPADPKDICSKDNSLIEYFEPTGYRKIALSTCNGGLMLANSDSPHPCPGKEKEFKEKYKVNHTSFLAIWIFAVLIFTGMLSFIYYRGIKRNGGFARFGEIRLGDDDLIEENNTDRAVNTVLRNGVFLFSNVYTGLQYFGHQVGNFFKRGLSRFGNTTGPSYQSLLHDQFLDDADDLLVGHDEDADDLASFIENEGNFEIGNDEEVDLSSDTPTHAPYSDNPEEANPHEST

1. A Pichia pastoris cell lacking vacuolar sorting activity or having reduced vacuolar sorting activity relative to a wild-type Pichia pastoris cell, wherein the host cell comprises a functional deletion of a vacuolar protein sorting receptor 10-1 (VPS10-1).

2. The Pichia pastoris cell of claim 1; wherein the cell comprises an expression vector which comprises a sequence of nucleotides that encodes a heterologous protein.

3. The Pichia pastoris cell of claim 2, wherein the heterologous protein is a glycoprotein.

4. The Pichia pastoris cell of claim 3, wherein the cell is modified to express a glycoprotein in which the glycosylation pattern is human-like.

5. The Pichia pastoris cell of claim 1, wherein a gene encoding VPS10-1 is deleted and a gene encoding VPS10-2 is not deleted.

6. The Pichia pastoris cell of claim 1, wherein a gene encoding VPS10-1 comprises a mutation that renders the encoded Vps10-1 protein nonfunctional or incapable of vacuolar sorting activity.

7. The Pichia pastoris cell of claim 1, wherein the functional deletion of Vps10-1 activity comprises an alteration selected from the group consisting of: deletion or disruption of upstream or downstream regulatory sequences of the VPS10-1 gene, abrogation of vacuolar sorting activity by means of a chemical, peptide or protein inhibitor of Vps10-1 protein, abrogation of vacuolar sorting activity by means of a nucleic acid-based expression inhibitor and abrogation of vacuolar sorting activity by means of a transcription inhibitor.

8. A method for producing a recombinant protein in a yeast or fungal host cell comprising:
a. transforming a genetically modified yeast or fungal cell with an expression vector encoding the protein to produce a host cell, wherein the genetically modified yeast or fungal cell lacks vacuolar sorting activity or has decreased vacuolar sorting activity relative to an unmodified yeast or fungal cell of the same species;
b. culturing the transformed yeast or fungal host cell in a medium under conditions which induce expression of the protein in fermentation conditions; and
c. isolating the protein from the transformed host cell or culture medium.

9. The method of claim 8, wherein the yeast or fungal host cell is selected from the group consisting of: Pichia pastoris, Saccharomyces cerevisiae, Aspergillus niger, Schizosaccharomyces pombe, Candida albicans, Candida glabrata, Pichia stipitis, Debaryomyces hansenii, Kluyveromyces lactis, and Hansenula polymolpha.

10. The method of claim 8 or 9, wherein vacuolar sorting activity has been eliminated or reduced by deletion or disruption of a gene encoding VPS10 or a VPS10 homolog from the yeast or fungal cell genome.

11. The method of claim 10, wherein the yeast or fungal host cell is Pichia pastoris.

12. The method of claim 11, wherein the VPS10 homolog VPS10-1 is deleted.

13. A method for producing a recombinant protein in a Pichia host cell comprising:
a. transforming a genetically modified Pichia cell with an expression vector encoding the protein to produce a host cell, wherein the genetically modified Pichia cell lacks vacuolar sorting activity or has decreased vacuolar sorting activity relative to an unmodified Pichia cell of the same species;
b. culturing the transformed Pichia host cell in a medium under conditions which induce expression of the protein; and
c. isolating the protein from the transformed host cell or culture medium.

14. The method of claim 13, wherein the host cell is a Pichia pastoris host cell.

15. The method of claim 14, wherein the genetically modified Pichia pastoris cell comprises a deletion of VPS10-1.

16. The method of claim 8, wherein the genetically modified host cell comprises an alteration of the cytoplasmic domain of Vps10 or the Vps10 homolog that alters its normal trafficking pattern.

17. The method of claim 8, wherein vacuolar sorting activity is reduced or eliminated by deletion or disruption of one or more genes that are associated with the CPY vacuolar sorting pathway, wherein the one or more genes encode a protein selected from the group consisting of: Gga1, Gga2, Mvp1, Pep12, Vps1, Vps8, Vps9, Vps15, Vps21, Vps19, Vps34, Vps38, Vps45, and Vti1.

18. The method of claim 8, wherein vacuolar sorting activity is reduced or eliminated by deletion or disruption of one or more genes that encode a protein associated with recycling of Vps10 to the late Golgi, wherein the one or more genes encode a protein selected from the group consisting of: Grd19, Rgp1, Ric1, Vps5, Vps17, Vps26, Vps29, Vps30, Vps35, Vps51, Vps52, Vps53, and Vps54.

19. The method of claim 8, wherein vacuolar sorting activity is reduced or eliminated by deletion or disruption of one or more genes that encode a protein associated with MVB function, wherein the one or more genes encode a protein selected from the group consisting of: Ccz1, Fab1, Hse1, Mrl1, Vam3, Vps2, Vps3, Vps4, Vps11, Vps13, Vps16, Vps18, Vps20, Vps22, Vps23, Vps24, Vps25, Vps27, Vps28, Vps31, Vps32, Vps33, Vps36, Vps37, Vps39, Vps41, Vps43, Vps44, Vps46, Vta1, and Ypt7.

20. The method of claim 8, wherein the expression vector encodes a glycoprotein and wherein the modified host cell has been further modified to express a glycoprotein in which the glycosylation pattern is human-like.
